United States Patent Application Publication US 2007/0026409 A1 - sequence listing, part 2

SEQ ID NO: 2004 - DNA, 6079 bp, Homo sapiens
  ref <308>: DATABASE ACCESSION NUMBER: Refseq / XM_168185
  ref <309>: DATABASE ENTRY DATE: 2003-01-03
cgcagcggccggagagggatggggggcgcccacccagtctgagcctcgccgcgggcgccttcggctcacgcagcgcttcccgcgggccgccagtgcgcaccctcggccacatcagcctccgcctggcgggtgcacccgggccggcgaggaaggggcaaccgtccgggtgggtggggcgggctgggtacctgaggtcaccagctcggctgtagaggcaggggcggcggaggcggaactgcggagttgctgggtccaccgacccttaccctcagcgagagaagtaaccaatgtgaaagatgttgcagaagtgttccagaagtggctgaagatagaaggaaaaaagtgccactgcctatcagaaaaaacaaaacaaaacatgggaaatacaaccaccaaattccgtaaagcactcatcaatggtgatgaaaacctggcctgccaaatatatgaaaacaatcctcagctaaaagaatctcttgatccaaatacatcttatggggagccctaccagcacaatactccattacattatgctgctagacatggaatgaataaaatattagggacttttcttggtagagatggaaatccaaataaacggaatgtgcacaatgaaacatctatgcatttgttgtgtatgggacctcaaattatgatatctgaaggagcccttcatcctcgcttggcacgccccacagaagatgatttcagaagagcagattgtctgcagatgatcttaaaatggaaaggagcaaaacttgaccagggtgaatatgagagagcagctattgatgctgttgataacaaaaaaaacacacccttgcactatgctgctgcctcagggatgaaagcctgtgtagagcttttagtaaaacatggaggagacttgtttgctgagaatgaaaataaagatactccttgtgattgtgctgaaaagcaacaccacaaagatttggccctcaatctggaatctcaaatggtattctcacgggatcccgaggctgaagaaatagaagctgaatatgctgcattagacaaacgagagccatatgaaggattaaggcctcaggatcttcgtagactaaaagatatgcttattgtggaaactgcagacatgcttcaggctcctctctttactgctgaagctttacttcgagctcatgactgggacagggagaaattacttgaagcttggatgtccaacccggagaactgctgccaacgatcaggtgttcaaatgccaactccaccaccaagtgggtataatgcctgggacacgctcccatctccaagaactccaaggactacacgctcttctgtcacctccccagatgaaatcagcttatctcctggggatttagacaccagtttgtgtgacatttgtatgtgcagtatctctgtatttgaagaccctgtggatatgccctgtggacatgacttttgtagaggatgttgggagtcgtttttgaatctgaaaattcaagaaggtgaagctcacaacattttttgccctgcatatgattgcttccaacttgtacctgtggatatcatagaaagtgtagtttcaaaggagatggacaaacgatacctacagtttgatattaaggcctttgttgaaaataatcctgccattaaatggtgtcctactccaggctgtgacagagcagtaagactaacgaaacaagggtcaaatacatctggatctgatacactcagcttcccattgctgagagctcctgctgttgattgtggaaaaggacacctcttctgctgggagtgccttggtgaagcacatgagccttgtgactgccaaacatggaagaattggctgcaaaaaataaccgaaatgaaaccagaagaacttgtgggagttagtgaagcctacgaggatgccgccaattgtctctggttattaactaactccaagccttgtgccaactgtaagtctccaatacagaagaatgaaggctgcaatcacatgcagtgtgctaagtgcaagtatgacttttgctggatttgccttgaagagtggaaaaaacatagttcgtccactggaggttattacagatgtactcgctatgaagtcattcaacacgtggaggagcaatccaaggaaatgactgtggaggctgagaaaaaacacaaacgatttcaggaacttgacagatttatgcactattatacaagatttaaaaaccatgagcatagttatcagctagaacaacgccttcttaaaacagccaaagaaaagatggagcaattgagcagagctctcaaagaaactgaaggaggctgtccagataccactttcattgaagatgcagttcatgtgctcttaaaaactcggcgcattctcaagtgttcttatccatatggatttttcttggaacctaaaagcacaaagaaagaaatttttgaactaatgcaaacagacctagaaatggtcactgaagaccttgcccagaaagtcaataggccttaccttcgcacaccccgccacaagatcatcaaagcagcatgccttgtacagcagaagaggcaagaattcctggcatctgtggctcggggagtagctcctgcagactcaccagaagctccaaggcgcagctttgctggtggaacatgggattgggaatatttaggatttgcatcaccagaggaatatgctgaatttcagtatcggaggaggcacagacaacgtcgtcgaggagatgttcacagtctactcagtaatcctccagaccctgatgagccaagtgaaagcactttagatattccagaaggcggcagcagcagccgcaggcctggcacatccgtggtaagttctgcatctatgagtgtgctgcacagctcttccctgcgtgactacacccctgccagtcgctctgaaaaccaggactctcttcaggctctgagttccttggatgaagacgatcccaatatacttcttgcaatacagttatcactgcaagagtctgggctggccctcgatgaagaaactagagacttcctcagtaatgaagcatccttaggtgcgataggcacttctttaccttccaggctggactctgtccccagaaatacagatagccctcgggctgcattgagcagctctgagcttttggaacttggtgacagcctcatgagactaggagcagagaatgacccattttcaactgacaccctgagctcacaccctctcagtgaggcaagaagtgatttctgtccctcatctagtgatcctgactcagctggccaggaccccaacatcaatgacaatcttctcggcaacatcatggcttggtttcatgacatgaaccctcagagtattgccctgattcctccagcaactacagaaatcagtgcagattcccagctcccctgtatcaaagatgggtcagaaggtgtgaaggatgtggaactggtgctgccagaagattcaatgtttgaagatgccagtgtcagtgaaggtagaggaacccagatagaagaaaatcctttggaagaaaatattctggcgggggaagcagcatctcaagctggtgacagtggtaacgaggcagccaacagaggagatggttcagatgtttcaagtcaaacacctcaaacctcaagtgactggcttgaacaagtacatttagtgtgaactgcacacatctgggctctaaatgaattacaggtacagatggtatgctaggtggagtatgcttgatagagactttgattcacttaattccaactcagtgataaaccactgacattagggttgaatacagagaagttcccttgaatggtagcttcattttttattttaaccttacagggaatttcctttgtacttaattgaatagcttttcccctttttgctgacaaaaagaagagcaagagaaagagaaacaaaaatgaaataaataagttgtattccacactctaagaaaatgcagtcctctatttagcctaggcttgacaatacttaaattgaacatttaaactaaaggcttactccctaatctttgggtggctttcctttaaaaaaaaaaaaaaagttttcttcattctagaaatttattttggataaatccgataacatatatgtcctcaatctctttgtgctcttccataacttacttcctttttgtctgagcaatgtgaattgaagtctctttagtaccacatctaccatagtgtaattagttttaattttcacatgaatcaaaggtttcctttcatgtctatttacagtccaattgtgccaaactcttacttgtgtgctgactaacaaggcatttaggtgtgcagcatcctagagtgctccagggcagtgtcagcgttctcgggagtaaaaggtgccacttggtagcaatgatattccagaattaaatgggtttttgttgccatggagactgcatttatataaatgtagcctgtagcttaagttaactaaacctaatgctgctgttaaaaacagtttattttaatattaaaatacagttgattagcaacagcggtgctgtattttaagagacactttattggaagtgcaatcatagttatttgttttcacaattttacagtgcattctaattactgatgggtgcaattacttttaatcgtgttttataaaatagaaaaaaagtggagttttcatgagttatagtaaatcccacgattattaagaaattcagtaaaacatcctgcgcaacatgttaccgtgcctttgcctaacctaaatggatagttgccagttaaataagtgagtaattcaaatttcaatgtctcttctgaagtaactatgctatgaattgcaaagacctccataaaaccacccatggccttgcttttacactaactataacaactaaatgttcaatcagtttgtttgcctaactagcaaatgctgacatgtgtttgttctactgcgcaatactcatttgctgtgtgattactgtttagtgttgaaaaaaatcaacttcctagttatcagtgtcttactgtgaagaaaatactggtcttagttgtaattaggatacaatggtacagtgtgtaattaaaactagagtaaactgttggaatggctgttttacttaaatattatcaaaactagcataacataagcaaaatagataagtacaacactccatttagtgttttgccagattgttaccagaagtctacagataccaaactttcagttctgagtttgtacaggcaagtcctgggctgggtaaaaagttatattaatattgttatccacaagagatgtgattatgggttttgattactttttttttttccaaaccctgcttttgaaatatccttgtacttaaaattcatattgctaagacactgtattagaatatttaatattccccagatcctcttaggataaactgtgggaatcctcctatgccatggatatcaaaggtccacattagtttttatttctccagtgatcagaaacattgatatcaatccctattaaattagtggggggaatattaactttatctacagtgtattactgtatattaaactgaaatagtccattaaaggatttttttataaatttattttggattaaaaatatcaacaccaataagtttttagaccaagttgtaatttttccaatatagagtctttgcatcacactgaggcatcttgcacagctgcagttaaggtgagaaagaatgctctgtgtgaagacagtgtacacaatgggttccggtttccttgcaccttgtgcagtatcctttatttctgtgctgttctctcctgagcatgaaaaatgatcattatccaatttgtatttccttggtacatattttaaaaacaacacagtcattgactttacaattcagtaatgaagtttggcaaagcctattttgtaaacaagttaattttataatgtaaaaaaaaaaagttaatctaaccttgacttgttatttgcactttcatagtctatacttgatacattcccactttatatacagtaggattctacaaacgtgtagatgtttggccaaatgaatgctgttaataatatgtaaaattctttgattaaacatttattacttaaact

SEQ ID NO: 2005 - protein, 1089 aa, Homo sapiens
  ref <308>: DATABASE ACCESSION NUMBER: Refseq / XP_168185
  ref <309>: DATABASE ENTRY DATE: 2003-01-03
MGNTTTKFRKALINGDENLACQIYENNPQLKESLDPNTSYGEPYQHNTPLHYAARHGMNKILGTFLGRDGNPNKRNVHNETSMHLLCMGPQIMISEGALHPRLARPTEDDFRRADCLQMILKWKGAKLDQGEYERAAIDAVDNKKNTPLHYAAASGMKACVELLVKHGGDLFAENENKDTPCDCAEKQHHKDLALNLESQMVFSRDPEAEEIEAEYAALDKREPYEGLRPQDLRRLKDMLIVETADMLQAPLFTAEALLRAHDWDREKLLEAWMSNPENCCQRSGVQMPTPPPSGYNAWDTLPSPRTPRTTRSSVTSPDEISLSPGDLDTSLCDICMCSISVFEDPVDMPCGHDFCRGCWESFLNLKIQEGEAHNIFCPAYDCFQLVPVDIIESVVSKEMDKRYLQFDIKAFVENNPAIKWCPTPGCDRAVRLTKQGSNTSGSDTLSFPLLRAPAVDCGKGHLFCWECLGEAHEPCDCQTWKNWLQKITEMKPEELVGVSEAYEDAANCLWLLTNSKPCANCKSPIQKNEGCNHMQCAKCKYDFCWICLEEWKKHSSSTGGYYRCTRYEVIQHVEEQSKEMTVEAEKKHKRFQELDRFMHYYTRFKNHEHSYQLEQRLLKTAKEKMEQLSRALKETEGGCPDTTFIEDAVHVLLKTRRILKCSYPYGFFLEPKSTKKEIFELMQTDLEMVTEDLAQKVNRPYLRTPRHKIIKAACLVQQKRQEFLASVARGVAPADSPEAPRRSFAGGTWDWEYLGFASPEEYAEFQYRRRHRQRRRGDVHSLLSNPPDPDEPSESTLDIPEGGSSSRRPGTSVVSSASMSVLHSSSLRDYTPASRSENQDSLQALSSLDEDDPNILLAIQLSLQESGLALDEETRDFLSNEASLGAIGTSLPSRLDSVPRNTDSPRAALSSSELLELGDSLMRLGAENDPFSTDTLSSHPLSEARSDFCPSSSDPDSAGQDPNINDNLLGNIMAWFHDMNPQSIALIPPATTEISADSQLPCIKDGSEGVKDVELVLPEDSMFEDASVSEGRGTQIEENPLEENILAGEAASQAGDSGNEAANRGDGSDVSSQTPQTSSDWLEQVHLV

SEQ ID NO: 2006 - DNA, 568 bp, Rattus norvegicus; identical to SEQ ID NO: 547
  ref <308>: DATABASE ACCESSION NUMBER: EMBL / AA892859
  ref <309>: DATABASE ENTRY DATE: 2000-03-03

SEQ ID NO: 2007 - DNA, 2852 bp, Homo sapiens; identical to SEQ ID NO: 548
  ref <308>: DATABASE ACCESSION NUMBER: Refseq / NM_001084
  ref <309>: DATABASE ENTRY DATE: 2003-01-08

SEQ ID NO: 2008 - protein, 738 aa, Homo sapiens; identical to SEQ ID NO: 549
  ref <308>: DATABASE ACCESSION NUMBER: Refseq / NP_001075
  ref <309>: DATABASE ENTRY DATE: 2003-01-08

SEQ ID NO: 2009 - DNA, 1552 bp, Rattus norvegicus
  ref <308>: DATABASE ACCESSION NUMBER: EMBL / AF069782
  ref <309>: DATABASE ENTRY DATE: 1998-06-17
ggcacgagggaacgtctaggcaacgtggtctccccgcccgcgggtaggcaaaggcgtttgcgcttcccagcgtctgaggcctagggagccttcagtagccgaaagttagtcttttgcagtggagtaagggctcgcggttagccgcgtagcgcccggatctggcctcaccatgttggtcctatttgaaacgtccgttggctacgccatctttaaggttctgaatgagaagaaacttcaagaggttgatagtttgtggaaagaatttgaaactccagagaaagcaaataaaatagtaaagctaaaacattttgagaaatttcaggatacagcagaagcattagcagcgttcacagctctgatggaaggcaagatcaataagcagctgaaaaaagttttgaagaaaatagtcaaagaagcccatgaacctctggctgtagctgatgctaagctaggaggggtcataaaggaaaaattgaatctcagctgtatccatagtcctgttgttaatgaacttatgagaggaatacgatcacaaatggatggcttgattcctggggtagaaccacgggagatggcagccatgtgtcttggactagcccacagcctatctcgatacagattgaaattcagtgctgataaagtagacacaatgatcgttcaggcaatttccttgttagatgacttggataaagaactaaacaactacattatgcggtgtagggaatggtatggctggcattttcctgagttagggaaaattatttcagataatttgacatactgcaagtgtttacagaaagttggagacaggaagaactatgcatctgccactctttctgaattcctgtcagaggaagtagaagctgaagtgaaagcagctgcagagatctctatgggaacagaggtttctgaagaagatatttgcaacattctacatctgtgtactcaggtcattgaaatttctgaatatagaactcagctgtatgaatatctgcaaaaccgaatgatggccattgcacccaatgttacagtcatggttggggagttggttggagcgcggcttattgctcatgcaggttctcttttgaatttggccaagcatgcagcttctacagttcagattctgggagcagaaaaggcacttttcagggccctcaaatctagacgagacacacctaaatatgggcttatttatcatgcttctcttgtaggccagacgagtcccaaacacaaaggaaagatttcacgaatgctggcggccaaaactgtgttggctatcagatacgacgcctttggtgaagattccagctctgcaatgggagctgagaacagagccaaattagaggccagattgaagattttggaggacagagggataagaaaaataagtggaacgggaaaggcattagcaaaagcagaaaagtatgaacacaaaagtgaagtgaagacttacgatccctctggtgactccacacttccaacttgttctaaaaaacgcaaaatagaagaggttgataaagaggatgaaattactgaaaaaaaaaaaaaaaaa

SEQ ID NO: 2010 - DNA, 507 bp, Rattus norvegicus
  ref <308>: DATABASE ACCESSION NUMBER: EMBL / Z38067
  ref <309>: DATABASE ENTRY DATE: 1996-03-13
atgcccctccacgtgagcctcgccaacggcaaccgcgacctggactacgactcggtgcagccatacttcatgtgcgacgatgaggaggaggacgtgcaccagcagcccccgcagccgccagcgcccagcgaggacatctggaagaaattcgagctgctgcccacgccgcgcccgtccccgggccacccgggcctctactcgcctccctgcgaagcggtcgccgcgtctttctcccccagggatcacgacggtgatagcttctccaccgcagatctgcccgagctgccaggagacgcggtgaagcagagcttcgtctgcgacccggacgacgagaccttcgtgaagaacatcattctgcaggactgtatgtggaacggcttctcggcctccgccaagctggtgtccaagctggacccctaccaggctgtgcgcaaagaaggcgccagcgtgagcccggccgccgacgtggagcctgctacgcctccagactgcacctgcaacacctga

SEQ ID NO: 2011 - DNA, 559 bp, Rattus norvegicus
  ref <308>: DATABASE ACCESSION NUMBER: EMBL / AA799347
  ref <309>: DATABASE ENTRY DATE: 2000-03-03
aggggtgaagaaattcctttattccgttcagtcactccaggcgtgagcgcaaggaggcagagtttacccgcgagctgggagaataagtcatatattacatggggcacaaatggcagtgtccctcacatccccacaccacagaatgctgtgcaatgttactggatggaaagctgtgagaagctactctcttcagtcctggaagcagagccaccagtgaaccaggccacactaaatagtcaaatcctgggcaaaggtataggtttctccctgcagccccaagatccactgaacagctatagactcttgcttcaggaccttctctccagccacaggaaactatccaagagccaacccctcccacttgaactgtgcatacagctgcacatggaggctataagatggctcggacggtaaaggcactttctaccatgtgatgacctgagttcaatccctggaacccatacggtagaaggagagaaccaacccccaaacatcctttgatctccacatccacaccatggcttacatcggagcacaggcacaagaagatacacacatc

SEQ ID NO: 2012 - DNA, 2398 bp, Rattus norvegicus
  ref <308>: DATABASE ACCESSION NUMBER: Refseq / NM_053849
  ref <309>: DATABASE ENTRY DATE: 2003-01-13
atggcgaaggctgtgtgatgctcatagggagaagaagatgttgatgtattgattgatgaccagctcccggtataggctgaaggctcaggctgcggggtggggccggtgtggcggggcgccaccgtctcgccctgattcgtgcggggattggacggctgcggcttccttgcctctaaccaatcaccgggctgaacttcctggaggttttggtgcgctccagcgtcgcttgggaggtcggcgagtgcttcgctgtggtgggtgtctgcaggcctccctcggcaccttaccatgaagctccggaaagcttggctgttggtcctgctcttggcgctgacacagctgctggctgctgcgagcgccgaagatgcgcacgaagatgcttcagattcagaaaatcccattgaggatgacgacgaggaggaggaagatgaagaagatgaagatgacttggaagttaaggaagaaaatggtgtttgggtcctaaacgatgaaaacttcgataactttgtggctgacaaagatacagtgctcctggagttctatgcaccgtggtgtggacactgcaagcaatttgctccagaatatgagaaaattgccagtactttgaaggataatgatcctcccattgctgttgcaaagattgacgcgacctcagcatccatgttggccagcaaattcgatgtgagtggctaccccaccatcaagatcctgaagaagggacaggctgttgactatgacggctccaggacccaggaagaaattgttgccaaagtcagagaagtttcccagcctgattggacacctccacctgaagtcactcttacattgactaaagagaactttgacgatgttgtaaataatgcagacatcattttggtggagttctatgccccatggtgcggacactgcaagaaacttgcccctgagtatgagaaggctgccaaggagctcagcaagcgctctcccccaattcccttagccaaagttgatgccaccgaacagacagacctggctaagaggtttgatgtctctggctaccccactttgaaaatattccgcaaaggaaggccttttgactacaatggtccacgagagaaatatggaattgttgactacatggttgagcagtctggacctccttccaaggagattctgaccctgaagcaggtccaggagtttctgaaggatggagatgatgtagtcatccttggagtctttcagggagtcggtgacccaggctacttgcagtatcaggatgctgctaacaccctgagagaagattacaaatttcaccacactttcagcactgaaatagctaagttcctgaaagtctccctggggaaactggtgctgatgcagcctgagaagttccagtccaagtatgagcccaggatgcatgtgatggatgttcagggctccacagaggcatcagccattaaggactatgtggtgaaacatgacttgcccctagtgggccacaggaagacttctaacgatgctaagcggtacagcaagcgccccctggtggttgtatactacagcgtggacttcagctttgattacagaactgctactcagttttggcgtaacaaagtcctagaggtggccaaggacttccctgagtacacattcgccattgctgatgaagaagactatgccacagaggtgaaggacctgggactgagtgagagtggagaggacgtcaatgcagccatcctagatgagagtgggaagaagtttgccatggagccagaggagtttgattcagatgctctccgagaatttgtcatggctttcaaaaaaggaaaactaaagccagttatcaaatcacagccagttcccaagaacaacaagggaccagtcagggtggtagtggggaagacctttgatgccattgtgatggaccccaaaaaggacgtcctcattgaattctatgcaccgtggtgtgggcactgcaagcagctggagcctgtctacaccagcctaggcaagaagtacaagggccagaaggacttggtcatcgccaagatggatgctactgccaatgacatcaccaacgaccgatacaaggtggagggcttccccaccatctattttgcccccagtggggacaaaaagaacccaattaagtttgagggtggcaacagagatctggagcatttgagcaagtttatcgatgaacatgccacaaagaggagcaggaccaaggaagagctttaaggcctggctgtgtgcagaaggtggagggatcagacactgtagtggacagctttggccaccaagcaagcaagccgtcattgaatggcaggatcttgaccctttttttgttatattttattaatgccacctcatgctctgatactgatagcatgatgacttgatagtttagatcagattt

SEQ ID NO: 2013 - protein, 643 aa, Rattus norvegicus
  ref <308>: DATABASE ACCESSION NUMBER: Refseq / NP_446301
  ref <309>: DATABASE ENTRY DATE: 2003-01-13
MKLRKAWLLVLLLALTQLLAAASAEDAHEDASDSENPIEDDDEEEEDEEDEDDLEVKEENGVWVLNDENFDNFVADKDTVLLEFYAPWCGHCKQFAPEYEKIASTLKDNDPPIAVAKIDATSASMLASKFDVSGYPTIKILKKGQAVDYDGSRTQEEIVAKVREVSQPDWTPPPEVTLTLTKENFDDVVNNADIILVEFYAPWCGHCKKLAPEYEKAAKELSKRSPPIPLAKVDATEQTDLAKRFDVSGYPTLKIFRKGRPFDYNGPREKYGIVDYMVEQSGPPSKEILTLKQVQEFLKDGDDVVILGVFQGVGDPGYLQYQDAANTLREDYKFHHTFSTEIAKFLKVSLGKLVLMQPEKFQSKYEPRMHVMDVQGSTEASAIKDYVVKHDLPLVGHRKTSNDAKRYSKRPLVVVYYSVDFSFDYRTATQFWRNKVLEVAKDFPEYTFAIADEEDYATEVKDLGLSESGEDVNAAILDESGKKFAMEPEEFDSDALREFVMAFKKGKLKPVIKSQPVPKNNKGPVRVVVGKTFDAIVMDPKKDVLIEFYAPWCGHCKQLEPVYTSLGKKYKGQKDLVIAKMDATANDITNDRYKVEGFPTIYFAPSGDKKNPIKFEGGNRDLEHLSKFIDEHATKRSRTKEEL

SEQ ID NO: 2014 - DNA, 510 bp, Rattus norvegicus
  ref <308>: DATABASE ACCESSION NUMBER: EMBL / AI031019
  ref <309>: DATABASE ENTRY DATE: 2000-03-03
acatgcagggagcacatcttgtgcagggtgagcagcctttccactccagccagccaggggccaacaatgggactttcagacctgtatgccaagggctcatttcagaggccttgaagaatccttttactcttgctgtcacatctgaagcctggtcccagttctagaagcaaggtgaagcaaccttgtggtttttagagactcagtctccggaagaacaagttaattacagactgcaaagctgaggagagatggcacaggagcagggaccccccagccgtgctgcatcactgagagatgcggtgacatcggctgagtacacaccttcagtgcctcacaagacagcagacactgtagctgacggcatctggctccatgccctcagcaggatccagccagatagaaaaaacaccaatgcaggagccattcacatggcactgtcacagaatgttgtctgtaaaagatgcgagtttactctaaacatgtttaaaacctgaaaaaaaaaaaaaaaaa

SEQ ID NO: 2015 - DNA, 1658 bp, Homo sapiens
  ref <308>: DATABASE ACCESSION NUMBER: Refseq / NM_001414
  ref <309>: DATABASE ENTRY DATE: 2002-11-05
gaggacgcctatggacgacaaggagttaattgaatactttaagtctcagatgaaagaagatcctgacatggcctcagcagtggctgccatccggacgttgctggagttcttgaagagagataaaggggagacaatccagggtctgagggccaatctcaccagtgccatagaaaccctgtgtggtgtggactcctctgtggcagtgtcctctggcggggagctcttcctccgcttcatcagtcttgcctccctggaatactccgattactccaaatgtaaaaagatcatgattgagagaggagagctttttctcaggagaatatcactgtcaagaaacaaaattgcagatctgtgccatactttcatcaaagatggagcgacaatattgactcacgcctactccagagtggtcctgagagtcctggaagcagccgtggcggccaagaagcgatttagtgtatacgtcacagagtcacagcctgatttgtcaggtaagaaaatggccaaagccctctgccacctcaacgtccctgtcactgtggtgctagatgctgctgtcggctacatcatggagaaagcagatcttgtcatagttggtgctgaaggagttgttgaaaacggaggaattattaacaagattggaaccaaccagatggctgtgtgtgccaaagcacagaacaaacctttctatgtggttgcagaaagtttcaagtttgtccggctctttccactaaaccagcaagacgtcccagataagtttaagtataaggcagacactctcaaggtcgcgcagactggacaagacctcaaagaggagcatccgtgggtcgactacactgccccttccttaatcactctgctgtttacagacctgggcgtgctgacaccctcagcagtcagcgatgagctcatcaagctctatctgtaacctgtgagccctttcctgccaaggtgcagcttacgtagttgaggcagggtgagtagctgcttgacaccccagtgagtcaggccaaaactgagatgtgtttaatgaagatttatggagtaaggacttaaaatcatacatcttggagaacctttcttactcatttcagtcccatctaaaaatgtgtcagctattctaaatcccaacttaaattgttcttacggtttctagaaactttccttttcagtttccagaaatacaagttagataattggctacttaactgatgaaagatgagcccaagtccacctgtcttcatcctcccctgcactccagactgatctgcctggggcacgcgagatgcaggcgaaaagcagccacacccctctgccacaaatgaccaacagctggtcaggacgttacacgcggtgccttgtaagaggcaagaaacacttgccgaatctgcatctggcttccagtggtaagcacattcctcagcaggatcaagccaaacagtaaaaactaccaagagaacacgaggaaggcagaaacgatgtttagcaacagtattctgcatggttcactgcttaagaaaatgccttctggaatatttgtaaactgaaattctgtatgtgtaagagatgtttaaatatgtttgggtcctaaacagctttttaaaattatacttgggaataaattcagcatcttttcaaataaactctatgaaccacac

SEQ ID NO: 2016 - protein, 305 aa, Homo sapiens
  ref <308>: DATABASE ACCESSION NUMBER: Refseq / NP_001405
  ref <309>: DATABASE ENTRY DATE: 2002-11-05
MDDKELIEYFKSQMKEDPDMASAVAAIRTLLEFLKRDKGETIQGLRANLTSAIETLCGVDSSVAVSSGGELFLRFISLASLEYSDYSKCKKIMIERGELFLRRISLSRNKIADLCHTFIKDGATILTHAYSRVVLRVLEAAVAAKKRFSVYVTESQPDLSGKKMAKALCHLNVPVTVVLDAAVGYIMEKADLVIVGAEGVVENGGIINKIGTNQMAVCAKAQNKPFYVVAESFKFVRLFPLNQQDVPDKFKYKADTLKVAQTGQDLKEEHPWVDYTAPSLITLLFTDLGVLTPSAVSDELIKLYL

SEQ ID NO: 2017 - DNA, 3889 bp, Rattus norvegicus
  ref <308>: DATABASE ACCESSION NUMBER: Refseq / NM_053949
  ref <309>: DATABASE ENTRY DATE: 2003-01-13
atgccggtgcggaggggccacgtcgcgccgcagaacaccttcctcgacaccatcatccgcaagtttgagggccagagccgcaagttcatcatcgctaacgctcgtgtagagaactgcgccgtcatctactgcaacgacggcttctgcgaactgtgcggctactctcgggccgaggtgatgcagcggccctgcacctgcgatttcctgcatgggccgcgcacgcagcgccgtgccgccgcgcagatcgcgcaggccctgctgggcgcggaggagcgcaaagtggagatcgccttctaccggaaagatgggagctgcttcctgtgtttggtggatgtggtgcccgtgaagaatgaggatggggctgtcatcatgtttatcctcaactttgaagtggtgatggagaaggacatggtagggtcgccagctcatgacaccaatcacagggggccctctaccagctggctagcttctggccgggccaagaccttccgcctgaagctgcctgccttgttggcactgactgccagggaatcgcccatgcggacaggaagcacgggcagtcctggagcccccggggcagtggtggtggatgtggacctgacgccggcagcacccagcagtgagtccctggccttggatgaggtttctgccatggacaaccatgtggctggacttgggcctgcagaagagaggcgagcactggtgggcccagcgtctgcttcaccggtagccagcatcccaggccctcacccgtcccctcgagctcagagccttaaccctgacgcctctggttccagctgcagtctggcccgaacacgctcacgggagagctgcgctagtgtgcgccgggcgtcttccgcagatgacatcgaggcaatgcgggctggggcgctgcccctcccgccccgacatgctagtacaggggccatgcaccccctgcgcagtggcctgcttaactccacctcagactctgacctcgtgcgctaccgaaccattagcaagataccccaaatcaccctcaactttgtggacctcaaaggcgaccctttcctggcttcacccaccagtgaccgggaaatcatagcacccaagataaaagagcggacccacaatgtcaccgagaaggtcacccaggtcctgtccttgggagccgatgtgcttcctgaatataagctgcaggccccaagaatacaccgctggaccatcctacactacagccccttcaaggcagtgtgggactggctcattctgctgctggtcatctacacagccgtcttcacaccgtactcggctgccttcctgctgaaggagactgaagatgggtcccaagcccctgactgcggctatgcctgccagcctctggctgtagtggacctcctcgtggacatcatgttcattgtggacatccttatcaatttccgcaccacctacgttaacgccaatgaagaggtggtcagccatcctggccgcatcgctgtgcactacttcaagggctggttcctcatcgacatggtggctgccatccccttcgacctgctcatctttggctctggctctgaggagctcatcggactgctgaaaactgccaggctgctgcggctggtgcgagtggctcggaagctggaccgctactcggagtatggggcagcagtgctcttcctgctcatgtgcaccttcgcgctcattgcacactggttggcctgcatctggtacgccatcggcaacatggaacagcctcacatggactcacacattggctggctgcacaacttgggcgaccagatcggcaagccctacaacagcagcggcctgggaggcccctccatcaaggacaagtacgtcacagcgctctacttcaccttcagcagcctcaccagcgtgggctttggcaatgtctctcccaacaccaactcagaaaagatcttctccatctgtgtcatgctcattggctccctcatgtatgccagcatcttcggcaacgtgtccgccatcatccagcggctgtactcgggcacggcccgctaccacacacagatgctccgggtgcgggagtttatccgcttccatcagattcccaacccgctacgccagcgcctcgaggagtacttccagcacgcttggtcctacaccaacggcatcgacatgaatgcggtgctgaagggtttccccgagtgcctgcaggctgacatctgcctacatctaaaccgctcactgctgcagcactgcaaaccattccgaggggccactaaaggctgcctgagggccctggccatgaaattcaagaccacacatgcgccaccaggggacacgctggtgcacgctggggacctgcttactgccctctacttcatctccaggggctccatcgagatcctgcggggtgatgtcgtggtggccatcttggggaagaacgacatctttggagagcctctgaacctgtatgcacgtcctgggaagtccaatggggatgtgagggccctcacttactgtgacctgcacaagatccatcgagacgatctgctggaggtgttggacatgtaccccgagttctcagaccacttttggtctagcctggagatcaccttcaaccttcgagataccaacatgattcctggctcccccagcagtgcggaactagagagcggcttcaacaggcagcgaaagcgcaaactgtccttccgcaggcgtactgacaaggacacagagcagccaggggaggtgtcagccctggggcaaggccctgcccgagttgggccagggccgagttgccggggacagccgggagggccatggggggagagcccatccagtggcccttccagcccagagagcagtgaggatgagggcccaggtcgcagctccagccccctccgcctggtgcccttctccagccccaggcctcccggagactccccaggtggggagcctttgacagaggatggagagaaaagcagtgacacttgtaatcccctgtcaggtgccttctctggggtgtccaatattttcagcttctggggggacagtcgggggcgccagtaccaggagctgcctcgatgccctgccccggcccctagcctcctcaacatccccttgtctagccctggccggcgttcccggggtgacgtggagagcaggctggatgcactccagagacagctgaacaggctggaaacccggctaagtgcagacatggccactgtcctacagctgctacagaggcaaatgaccctggtccctcctgcctacagtgctgtgaccacccctgggcctggccccacttccacgtcccctttgttgcctgtcggccccgtccccactctcaccctggactcgctttctcaggtttcccagttcgtggcgtttgaggagcttcctgcaggagccccagagctcccccaagatggccccactcgacgcctctccctgccgggccagctgggggccctcacctcccagcccctgcacagacatggctcagatccaggcagttagtgacgctgcccggtgtggacacgtggctcaccctggggtcaggggattacctgaccgctctccttggagaccctggtttgaaggggagaacagtgcaggagcacctcctcccccgcccttgggaccagcatctcctcctgcaataccctgggccccactgggaggggcaggggcagagctgggcagtggacagggggtctgtggtccccccactgccctgggggcattagctggtctaactgcccggaggcacccggccctgggccttaggcacctcaaggacttttctgctatttactgctcttattgttaaggataataattaaggatcatatgaataattaatgaagatgctgatgactatgaataataaataattatcctgaggaaaaaaaaa

SEQ ID NO: 2018 - protein, 1163 aa, Rattus norvegicus
  ref <308>: DATABASE ACCESSION NUMBER: Refseq / NP_446401
  ref <309>: DATABASE ENTRY DATE: 2003-01-13
MPVRRGHVAPQNTFLDTIIRKFEGQSRKFIIANARVENCAVIYCNDGFCELCGYSRAEVMQRPCTCDFLHGPRTQRRAAAQIAQALLGAEERKVEIAFYRKDGSCFLCLVDVVPVKNEDGAVIMFILNFEVVMEKDMVGSPAHDTNHRGPSTSWLASGRAKTFRLKLPALLALTARESPMRTGSTGSPGAPGAVVVDVDLTPAAPSSESLALDEVSAMDNHVAGLGPAEERRALVGPASASPVASIPGPHPSPRAQSLNPDASGSSCSLARTRSRESCASVRRASSADDIEAMRAGALPLPPRHASTGAMHPLRSGLLNSTSDSDLVRYRTISKIPQITLNFVDLKGDPFLASPTSDREIIAPKIKERTHNVTEKVTQVLSLGADVLPEYKLQAPRIHRWTILHYSPFKAVWDWLILLLVIYTAVFTPYSAAFLLKETEDGSQAPDCGYACQPLAVVDLLVDIMFIVDILINFRTTYVNANEEVVSHPGRIAVHYFKGWFLIDMVAAIPFDLLIFGSGSEELIGLLKTARLLRLVRVARKLDRYSEYGAAVLFLLMCTFALIAHWLACIWYAIGNMEQPHMDSHIGWLHNLGDQIGKPYNSSGLGGPSIKDKYVTALYFTFSSLTSVGFGNVSPNTNSEKIFSICVMLIGSLMYASIFGNVSAIIQRLYSGTARYHTQMLRVREFIRFHQIPNPLRQRLEEYFQHAWSYTNGIDMNAVLKGFPECLQADICLHLNRSLLQHCKPFRGATKGCLRALAMKFKTTHAPPGDTLVHAGDLLTALYFISRGSIEILRGDVVVAILGKNDIFGEPLNLYARPGKSNGDVRALTYCDLHKIHRDDLLEVLDMYPEFSDHFWSSLEITFNLRDTNMIPGSPSSAELESGFNRQRKRKLSFRRRTDKDTEQPGEVSALGQGPARVGPGPSCRGQPGGPWGESPSSGPSSPESSEDEGPGRSSSPLRLVPFSSPRPPGDSPGGEPLTEDGEKSSDTCNPLSGAFSGVSNIFSFWGDSRGRQYQELPRCPAPAPSLLNIPLSSPGRRSRGDVESRLDALQRQLNRLETRLSADMATVLQLLQRQMTLVPPAYSAVTTPGPGPTSTSPLLPVGPVPTLTLDSLSQVSQFVAFEELPAGAPELPQDGPTRRLSLPGQLGALTSQPLHRHGSDPGS

SEQ ID NO: 2019 - DNA, 583 bp, Rattus norvegicus
  ref <308>: DATABASE ACCESSION NUMBER: EMBL / AA892810
  ref <309>: DATABASE ENTRY DATE: 2000-03-03
gtcaaggtctttgcttaagcctaacttcaatccatatggtgaaggaggacaggtttacgcagctgtcctctgaccacgtgtgctgcagcacgcgagttcacacaatgaaataaaatgtcttctaaagcattctttctggggaaatgacctgtgttctatttttccaacccaaaggtaaggtccaatgagcccaggatgggaaaatttgacatcagaaaggagccagcaggttggtgggtagatggcattgatactggatgacctgtggtgagagagacaagagacgcagggatctcggtggcatcaaggttgagaaaagagtgtcttcatagtaaaaggaactggagccacttggctcactggggggcgattaaggtccccttgcatcaggcacaatgcaaaatgggtcataggctaagtgcaaaccatactgataagaactagaacatggggctggagagatggcttagcagttctagaggtcctgagttcaaatcccagcaaccacatggtgactcacaaccatctgtaatgagatctgatgccctcttctggtgtgtctgaagacagctacagtgtactc

SEQ ID NO: 2020 - DNA, 5122 bp, Homo sapiens; identical to SEQ ID NO: 1933
  ref <308>: DATABASE ACCESSION NUMBER: Refseq / NM_032866
  ref <309>: DATABASE ENTRY DATE: 2002-12-23

SEQ ID NO: 2021 - protein, 612 aa, Homo sapiens; identical to SEQ ID NO: 1934
  ref <308>: DATABASE ACCESSION NUMBER: Refseq / NP_116255
  ref <309>: DATABASE ENTRY DATE: 2002-12-23

SEQ ID NO: 2022 - DNA, 1872 bp, Rattus norvegicus
  ref <308>: DATABASE ACCESSION NUMBER: EMBL / E01524
  ref <309>: DATABASE ENTRY DATE: 2000-09-02
atgatccaaacaacggccccacccgtcaaagagagcagcttcgtggaaaagatgaagaaaacgggaaggaacattatcgtattctatggctcccagacgggaaccgctgaggagtttgccaaccggctgtccaaggatgcccaccgctacgggatgcggggcatgtccgcagaccctgaagagtatgacttggccgacctgagcagcctgcctgagatcgacaagtccctggtagtcttctgcatggccacatacggagagggcgaccccacggacaatgcgcaggacttctatgactggctgcaggagactgacgtggacctcactggggtcaagtttgctgtatttggtcttgggaacaagacctatgagcacttcaatgccatgggcaagtatgtggaccagcggctggagcagcttggcgcccagcgcatctttgagttgggccttggtgatgatgacgggaacttggaagaggatttcatcacgtggagggagcagttctggccagctgtgtgcgagttctttggggtagaagccactggggaggagtcgagcattcgccagtatgagctcgtggtccacgaagacatggacgtagccaaggtgtacacgggtgagatgggccgtctgaagagctacgagaaccagaaaccccccttcgatgctaagaatccattcctggctgctgtcaccgccaaccggaagctgaaccaaggcactgagcggcatctaatgcacctggagttggacatctcagactccaagatcaggtatgaatctggagatcacgtggctgtgtacccagccaatgactcagccctggtcaaccagattggggagatcctgggagctgacctggatgtcatcatgtctctaaacaatctcgatgaggagtcaaacaagaagcatccgttcccctgccccaccacctaccgcacggccctcacctactacctggacatcactaacccgccacgcaccaatgtgctctacgaactggcacagtacgcctcagagccctcggagcaggagcacctgcacaagatggcgtcatcctcaggcgagggcaaggagctgtacctgagctgggtggtggaagcccggaggcacatcctagccatcctccaagactacccatcactgcggccacccatcgaccacctgtgtgagctgctgccacgcctgcaggcccgatactactccattgcctcatcctccaaggtccaccccaactccgtgcacatctgtgccgtggccgtggagtacgaagcgaagtctggccgagtgaacaagggggtggccactagctggcttcgggccaaggaaccagcaggcgagaatggcggccgcgccctggtacccatgttcgtgcgcaaatctcagttccgcttgcctttcaagtccaccacacctgtcatcatggtgggccccggcactgggattgcccctttcatgggcttcatccaggaacgagcttggcttcgagagcaaggcaaggaggtgggagagacgctgctatactatggctgccggcgctcggatgaggactatctgtaccgtgaagagctagcccgcttccacaaggacggtgccctcacgcagcttaatgtggccttttcccgggagcaggcccacaaggtctatgtccagcaccttctgaagagagacagggaacacctgtggaagctgatccacgagggcggtgcccacatctatgtgtgcggggatgctcgaaatatggccaaagatgtgcaaaacacattctatgacattgtggctgagttcgggcccatggagcacacccaggctgtggactatgttaagaagctgatgaccaagggccgctactcactagatgtgtggagctag

SEQ ID NO: 2023 - DNA, 3170 bp, Rattus norvegicus
  ref <308>: DATABASE ACCESSION NUMBER: Refseq / NM_031521
  ref <309>: DATABASE ENTRY DATE: 2003-01-13
ctgaggctggggctgtcactcattctccgctcagcggtgaacgcagctcggcagtggctggcaagaaacaattctgcaaaaataatcatatccagcctggcaattgtctgctcctcggtccattgctccgccgccgtccacagtcgcttgcaagggaaggcactgaatttaccgcggccagaacatccctcccagccggcagtttacaatgctgcgaactaaggatctcatctggactttgtttttcctgggaactgcagtttccctgcaggtagatattgttcccagccaaggagaaatcagcgttggagagtccaaattcttcctgtgtcaagtggcaggagatgccaaagataaggacatctcctggttctcccccaacggggagaaactgagcccaaaccagcagcggatctcagtggtgtggaacgatgatgactcctctaccctcaccatctacaacgccaacattgatgatgccggcatttacaagtgcgtggtcaccgctgaagacggcacccagtccgaggccactgtcaatgtgaagatcttccagaagctcatgttcaagaatgcgccaaccccacaggagtttaaggaaggggaagatgctgtgattgtctgtgatgtggtcagctctctgcccccaaccatcatctggaaacacaaaggccgagatgtcatcctgaaaaaagatgtccggttcatagtcctatccaacaactacctgcagatccgaggcatcaagaaaacagatgagggcacttaccgctgtgaaggcaggatcctggcccggggggagatcaacttcaaggacattcaggtcattgtgaatgtaccacccactgtccaggccagacagagcatcgtgaatgccactgccaacctgggccagtctgtcaccctggtgtgtgatgccgatggcttcccagagcccaccatgagctggacaaaggatggggaacccatagagaatgaggaggaagatgacgagaagcacatcttcagtgacgacagttcggagctgaccatcaggaatgtggacaaaaatgacgaagccgaatacgtctgcatcgctgagaacaaggctggcgagcaggatgcctccatccacctcaaggtcttcgcaaagcccaaaatcacctatgtagagaatcagacagccatggaactagaggagcaagtcactctgacatgtgaagcctccggagaccccattccttccatcacctggagaacgtccacccgaaacatcagcagtgaagaaaaggcatcgtggactcgaccagagaagcaagagactctagatgggcacatggtggtacgcagccatgctcgtgtgtcctccctgaccctgaagagcatccagtacacagatgctggagaatacatctgcactgccagcaacaccatcggccaggactcccagtccatgtaccttgaagttcaatatgctcccaagctccagggccctgtagctgtgtacacttgggaagggaaccaggtgaacatcacctgtgaggtctttgcctacccaagtgccacaatctcctggttccgagatggccagttgctgccaagctccaactacagcaatatcaagatctacaacaccccatctgcgagctatctggaggtaacccctgattccgaaaatgactttggaaactacaactgcacagcggtgaaccgtattggacaggagtccttggaattcatcctggttcaagcagatacaccatcttccccatccatcgaccgggtggaaccatactccagcacagcacaggtacaatttgatgagccagaagccacaggtggagttcccatcctcaaatacaaggctgagtggaagtcgctgggtgaagaagcatggcattccaagtggtatgatgccaaagaagccaacatggaagggattgtcaccatcatgggcctgaagcctgagacaaggtacgcggtacgactggcggccctcaacggcaaggggctgggcgagatcagtgcagccactgagttcaagacacagccagtccgggaacccagcgcacccaagctggaagggcagatgggagaggacgggaactccatcaaggtgaacctgatcaagcaggatgacggcggctcccccatcagacactatctggtcaagtacagagcgctcgcctccgagtggaaaccagagatcaggctcccgtccggcagtgaccacgtcatgctcaagtccctagactggaacgccgagtacgaagtatatgtggtagctgagaaccagcaaggaaaatccaaggcagctcacttcgtgttcaggacttcagcccagcccacggccatcccagccaatggcagccccactgcaggcctgagcacaggcgccattgtgggcatcctcattgtcattttcgtcctactcctggtggtcatggacatcacctgctacttcctgaacaagtgtggcctgctcatgtgcatcgctgttaacctgtgcggcaaagcggggcccggagccaagggcaaagacatggaggagggcaaggctgctttctcgaaagatgagtctaaagaacccattgtagaggtccgaacggaggaggaacggactccaaaccatgacggagggaagcacacagagcccaacgagaccacaccactgacagagcccgagaagggtcctgtagaaacaaagtccgagccccaggagtcagaagcaaagccagcgccaactgaagtcaagacggtccccaatgaagccacacaaacgaaagagaatgagagcaaagcatgatgggtaccagcaaaaagcaaagatcaaaataacaaattgacacagcggcttcaccagagcatccccaaataaccccccccccctctctctctctctcacacacacacacacacacacacacacacacacacacacacactcactcctctagtgtcttttgccttttaaaaaaacaacaaaaaacagataaacatgggattgcctttttgtaggtttctagaaagggctcctttgttgcacactcacttgttaagaaaaaaaaagagacaaaaaggttaaacccacagccaaactaggacactccgttccctgaaaccatttaaaaatcaaacaaaagggccccaaattaagaatctaggaagctcagactgaagagaaaaacaag

SEQ ID NO: 2024 - protein, 858 aa, Rattus norvegicus
  ref <308>: DATABASE ACCESSION NUMBER: Refseq / NP_113709
  ref <309>: DATABASE ENTRY DATE: 2003-01-13
MLRTKDLIWTLFFLGTAVSLQVDIVPSQGEISVGESKFFLCQVAGDAKDKDISWFSPNGEKLSPNQQRISVVWNDDDSSTLTIYNANIDDAGIYKCVVTAEDGTQSEATVNVKIFQKLMFKNAPTPQEFKEGEDAVIVCDVVSSLPPTIIWKHKGRDVILKKDVRFIVLSNNYLQIRGIKKTDEGTYRCEGRILARGEINFKDIQVIVNVPPTVQARQSIVNATANLGQSVTLVCDADGFPEPTMSWTKDGEPIENEEEDDEKHIFSDDSSELTIRNVDKNDEAEYVCIAENKAGEQDASIHLKVFAKPKITYVENQTAMELEEQVTLTCEASGDPIPSITWRTSTRNISSEEKASWTRPEKQETLDGHMVVRSHARVSSLTLKSIQYTDAGEYICTASNTIGQDSQSMYLEVQYAPKLQGPVAVYTWEGNQVNITCEVFAYPSATISWFRDGQLLPSSNYSNIKIYNTPSASYLEVTPDSENDFGNYNCTAVNRIGQESLEFILVQADTPSSPSIDRVEPYSSTAQVQFDEPEATGGVPILKYKAEWKSLGEEAWHSKWYDAKEANMEGIVTIMGLKPETRYAVRLAALNGKGLGEISAATEFKTQPVREPSAPKLEGQMGEDGNSIKVNLIKQDDGGSPIRHYLVKYRALASEWKPEIRLPSGSDHVMLKSLDWNAEYEVYVVAENQQGKSKAAHFVFRTSAQPTAIPANGSPTAGLSTGAIVGILIVIFVLLLVVMDITCYFLNKCGLLMCIAVNLCGKAGPGAKGKDMEEGKAAFSKDESKEPIVEVRTEEERTPNHDGGKHTEPNETTPLTEPEKGPVETKSEPQESEAKPAPTEVKTVPNEATQTKENESKA

SEQ ID NO: 2025 - DNA, 564 bp, Rattus norvegicus
  ref <308>: DATABASE ACCESSION NUMBER: EMBL / AA891546
  ref <309>: DATABASE ENTRY DATE: 2000-03-03
gtggcttctttcagtgcttcctttgagggctgagtggcggtctgcacttactcgtcctccaaacgatgcatcctgacttgtctccacacttgcacactgaagaatgcaacgtcttgattaacttgcttaaggaatgtcacaaaaatcacaacattctgaaattttttggtcattgcaacgatcttgatcgggaaatgaggaagtgcttgaagaatgagtacatggagaagaggaacaggagcagggagcacggcgctgcgatgcgaagcaggctttctgatcctccagaggaaactggaagataggctcactggatgcctcggctgggagacctgaaggtggccggtagctgaaaaaaaatcccttccttttggcctttaggaccctttgaatggaaagcactctatgaagaactgagccgtggagaatcaggagaacatggggtccgggacttgctgaactttaatgccatgcactgtgcctctgaaagtttcctccactgctgccctgaatctgtgtctacccaggcctgactcgcctcctgcaataaaggcttagcacagt

SEQ ID NO: 2026 - DNA, 2842 bp, Rattus norvegicus
  ref <308>: DATABASE ACCESSION NUMBER: EMBL / D13623
  ref <309>: DATABASE ENTRY DATE: 1999-01-21
tcgcggaaggtgacgtggacacggaagtggtcgtcgtcgcggcggcaccggtgggagcggggccctgcacttggagtgcggcgggcaagcggacgggtggcggaggcctctcagcggcggcggcggcgacttaaggcgcaggcgtggtccgttgggtgcgaatccgctgagcccacgagcggcctcttagccctctctcctgcccgtcggaaaccgggagcagggacccgcttagccggcgtcatcatgaccaagaccggtagcaagggcgggaacctccgcgacaagctggacggcaatgagctggacctgagtctcagcgacctgaatgaggtccccgtcaaggagctggctgcacttccaaaggccaccgtgttggatctgtcctgcaataaactgagcactcttccgtcggatttctgtggcctcacgcacctggtaaagctggacctcagcaagaacaagctgcagcagctgcccgcagactttggtcgcctggttaaccttcagcatttggatctcctcaacaacaggctggtcaccctgcctgtcagctttgctcagctcaagaatctgaagtggctggatctgaaggacaatcccttggatcctgtcctggccaaggtggcaggtgattgcttggatgagaagcaatgtaagcagtgtgcaaacaaggtgttacagcacatgaaggccgtgcaggcagatcaggaacgagagcggcagcgccggctggaagtggagcgagaggcagagaagaagcgtgaggccaagcagcaagctaaggaagcaaaggagcgcgagctgaggaagcgggagaaggcggaggagaaggagcgtcggcgaaaggagtatgatgctcagaaagcttccaagcgggagcaagagaagaagcctaagaaggaaacaaatcaggccccaaaatcgaagtctggctctcgccctcgcaagccaccaccccgaaaacacaatcgctcctgggctgtgctgaaggggttgttgctgctgctgctgctatgtgtagcaggagggctggttgtatgccgggtgacagggctgcaacagcagcccctctgcaccagcgtgaacgccatctacgacaatgccgtccagggcctgcgccatcatgagatcctccagtgggtcctccagaccgactcccagcagtgagctcatcctcagcaccgctgcctcccagcctcggagcttggattcctatggaattgggttctgctggacacaacttctttttagcgtcagacctacctgccatcatcaaatggctgctgagtggtacttgagatctcccctttgtaggacttctctgttccttagtcagggttccctggtggaatgaggagaaatggagaggggggaggaagagttacctgcatgcctaaaggaataggcttaggggtggggagagagaaggcataggcttttctagttatgcaaagctgtgtaaggcaaggttcctttctactaaatggtcagctgtcactacatttatacttttgtatgtcacaaaccctttctttcattcctccctgggtaaccaggacggattggagggcagtgtgttactgggactaggggactaggaatacttgggtaaattcagcctaagctgggagggtaaagtaatacatttccttaaagatctcagacagtcaagcattttagcaatgtccaaaatgtctggctatgaacacatgttcactgccattggtccagtgtaacactttgaggcaggaggtgccgtccatgacttacttgcctacagtgttcaagctagtccaaggcacaacccagctttcactccagttttcttcctttcctttatgtcatttggcctcctttataatactcaaggggatgaactcacaccagagttgtcttagctaaagtgaatctttcataatagacggtcttaccacccacaaatagatctcatcagggtcctgggaaactaatcctgtggaattttgcctcagcttaaatggcttccacaaaatggcagcaggctgggctccttgcctcccttttagagcattaaactccctgatggcctggaagcacaggggcagatctctgcagcggcactgtgactgccctactagcacttggtatgatgaaatacctcaaaggcaacctagaaacttgatctcacagaagcaggtgcagagttgcttctggacctgtaacagaagggaaggaatagaacagtgggagccaaagggaaacaaagtcacacggtggcgctgcaagtgatacataagtaaacattagcacaaaccagggcagcagcacccacctccctgctgctaccagaaagcattctccccgcttccctgtctcttcacaacagctgcaggaagggatcggaaacctgtctcggtgcttatttgctaaaactcccaactgcaagctctccctagaggagcaggacctgtcggagttcagacagtgtagccccagtggcccatgtgcttaggtcagccactcaagactgtcctgacacgggaagaaaggcctttgtttttccctcccccagatagttctgccgtgtaggtccacaccttactcagaatcactacacattcctttagtcttcctccaagctccagagccatcggtacaaatgctttattgagacaaaatacatactacatatggtgacatcatgaaaacagaagtcagcctcatagatccctggctggttgaggcagctcagtggctgggcgtagtcaagccaacccgcaggcaagagttcactctgacttcgagatttgatgcttattctttggatttctacaattattaaatccgtgtctgagtggtc

SEQ ID NO: 2027 - protein, 308 aa, Rattus norvegicus
  misc_feature (1)..(308): Xaa=Unknown amino acid
MTKTGSKGGNLRDKLDGNELDLSLSDLNEVPVKELAALPKATVLDLSCNKLSTLPSDFCGLTHLVKLDLSKNKLQQLPADFGRLVNLQHLDLLNNRLVTLPVSFAQLKNLKWLDLKDNPLDPVLAKVAGDCLDEKQCKQCANKVLQHMKAVQADQERERQRRLEVEREAEKKREAKQQAKEAKERELRKREKAEEKERRRKEYDAQKASKREQEKKPKKETNQAPKSKSGSRPRKPPPRKHNRSWAVLKGLLLLLLLCVAGGLVVCRVTGLQQQPLCTSVNAIYDNAVQGLRHHEILQWVLQTDSQQX

SEQ ID NO: 2028 - DNA, 346 bp, Rattus norvegicus
  misc_feature (1)..(346): n=a, c, g or t
  ref <308>: DATABASE ACCESSION NUMBER: EMBL / AA875665
  ref <309>: DATABASE ENTRY DATE: 2000-03-03
aagaagatgctggctcgggatgagcgccgattccgggtagctgaccaagatggngactccatggctactcgggaagagctgacggcctttctgcatcctgaggagttccctcacatgcgggacatcgtggtggcagagaccctcagtcaccttctcttccagagacccctgtcaccagccctggtaccccccccaacctgcccaggacactcaggcacttaaatgacactgataccatccccagcacagacccaggggaccacatcctgactgaacctcaatctgaactaaaacagcacaagctaacctgtcctgcctaggagcaataaaagctgttgctggggtc

SEQ ID NO: 2029 - DNA, 1454 bp, Homo sapiens
  ref <308>: DATABASE ACCESSION NUMBER: Refseq / NM_020650
  ref <309>: DATABASE ENTRY DATE: 2003-03-01
gtagagcggagatctggcataacaggggaccgatgatgtggcgaccatcagttctgctgcttctgttgctactgaggcacggcgcccaggggaagccatccccagacgcaggccctcatggccaggggagggtgcaccaggcggcccccctgagcgacgctccccatgatgacgcccacgggaacttccagtacgaccatgaggctttcctgggacgggaagtggccaaggaattcgaccaactcaccccagaggaaagccaggcccgtctgggcgggatcgtggaccgcatggaccgcgcgggggacagcgacggctgggtgtcgctggccgagcttcgcgcgtggatcgcgcacacgcagcagcggcacatacgggactcggtgagcgcggcctgggacacgtacgacacggaccgcgacgggcgtgtgggttgggaggagctgcgcaacgccacctatggccactacgcgcccggtgaagaatttcatgacgtggaggatgcagagacctacaaaaagatgctggctcgggacgagcggcgtttccgggtggccgaccaggatggggactcgatggccactcgagaggagctgacagccttcctgcaccccgaggagttccctcacatgcgggacatcgtgattgctgaaaccctggaggacctggacagaaacaaagatggctatgtccaggtggaggagtacatcgcggatctgtactcagccgagcctggggaggaggagccggcgtgggtgcagacggagaggcagcagttccgggacttccgggatctgaacaaggatgggcacctggatgggagtgaggtgggccactgggtgctgccccctgcccaggaccagcccctggtggaagccaaccacctgctgcacgagagcgacacggacaaggacgggcggctgagcaaagcggaaatcctgggtaattggaacatgtttgtgggcagtcaggccaccaactatggtgaggacctgacccggcaccacgatgagctgtgagccccgcgcacctgccacagcctcagaggcccgcacaatgaccggaggaggggccgctgtggtctggccccctccctgtccaggccccgcagaggcagatgcagtcccaggcatcctcctgcccctgggctctcagggaccccctgggtcggcttctgtccctgtcacacccccaaccccagggaggggctgtcatagtcccagaggataagcaatacctatttctgactgagtctcccagcccagacccagggacccttggccccaagctcagctttaagaaccgccccaacccctccagctccaaatttgagcctcccccacatagactgaaactcccctggccccagccctttcctgcctggcctggcctgggacacctcctctctgccaggaggcaataaaagccagcgccgggaaaaaaaaaaaaaaaaa

SEQ ID NO: 2030 - protein, 328 aa, Homo sapiens
  ref <308>: DATABASE ACCESSION NUMBER: Refseq / NP_065701
  ref <309>: DATABASE ENTRY DATE: 2003-03-01
MMWRPSVLLLLLLLRHGAQGKPSPDAGPHGQGRVHQAAPLSDAPHDDAHGNFQYDHEAFLGREVAKEFDQLTPEESQARLGGIVDRMDRAGDSDGWVSLAELRAWIAHTQQRHIRDSVSAAWDTYDTDRDGRVGWEELRNATYGHYAPGEEFHDVEDAETYKKMLARDERRFRVADQDGDSMATREELTAFLHPEEFPHMRDIVIAETLEDLDRNKDGYVQVEEYIADLYSAEPGEEEPAWVQTERQQFRDFRDLNKDGHLDGSEVGHWVLPPAQDQPLVEANHLLHESDTDKDGRLSKAEILGNWNMFVGSQATNYGEDLTRHHDEL

SEQ ID NO: 2031 - DNA, 1258 bp, Rattus norvegicus
  ref <308>: DATABASE ACCESSION NUMBER: Refseq / NM_012796
  ref <309>: DATABASE ENTRY DATE: 2002-09-30
gggggaacgcgtcagacttggccaactgaggctgggctggacccctattgtggaatcgcggacacttcctacagttgtcgaacgcaatccgtctacaccaccttgtgtcactacctaccaccatgggtttggagctctacctggacctgctgtcgcagcccagccgcgcggtctacatcttcgccaagaagaatggcattccctttcagttgcgtaccgtggatttactcaaagggcagcacttgagcgagcaattctcccaggtgaactgcttaaagaaagtgcctgtcctcaaagacggaagcttcgtgttgaccgaaagcactgccatcttgatttacctgagttccaagtaccaggtggcagaccactggtacccggccgacctacaggcccgtgcccaagtccacgaatacctgggttggcatgccgacaacatccgtggcacctttggagtactcctgtggaccaaggtgttggggccactcattggggtccaggttcccgaggaaaaggtggaacggaacagaaatagtatggtcttggctctgcaacgtctggaggacaagttcctcagggacagggccttcattgctggccagcaggtgacgctagcggatctcatgtctctagaggagttgatacagccggtggctcttggctgtaatctgtttgaggggcggcctcaactgacagcgtggcgagagagggtggaggcgttcttgggtgctgagctatgtcaggaggcgcacaaccccatcatgagcgtcctgggacaggcagccaagaaaacattaccagtaccccctccggaggcccatgccagcatgatgcttcgaattgccaggattccctgagtggttttttttccctgagtatttttattgctataaagactcattttgtattttgcctctttgttttgttttgtttttgtttcttcttgtcccaacctttttttttttttttttttttctggctccttttctggctctgggaggagctttgctcaaaagggacaccacctatccttagcatgcttctcttgaggtacagtatgcacaaccaataggagacccaagtcaataatatataaaaggtgcttaaaaaaaaaaaagcaaacagtaacacacacgaagaaatcaaccaaaaattggtggacatctgttttttattataatatagattctgaatattttaaggaataaagagttattgttttattacattgccctctaatctgtatggaataaattat

SEQ ID NO: 2032 - protein, 244 aa, Rattus norvegicus
  ref <308>: DATABASE ACCESSION NUMBER: Refseq / NP_036928
  ref <309>: DATABASE ENTRY DATE: 2002-09-30
MGLELYLDLLSQPSRAVYIFAKKNGIPFQLRTVDLLKGQHLSEQFSQVNCLKKVPVLKDGSFVLTESTAILIYLSSKYQVADHWYPADLQARAQVHEYLGWHADNIRGTFGVLLWTKVLGPLIGVQVPEEKVERNRNSMVLALQRLEDKFLRDRAFIAGQQVTLADLMSLEELIQPVALGCNLFEGRPQLTAWRERVEAFLGAELCQEAHNPIMSVLGQAAKKTLPVPPPEAHASMMLRIARIP

SEQ ID NO: 2033 - DNA, 1004 bp, Homo sapiens
  ref <308>: DATABASE ACCESSION NUMBER: Refseq / NM_000853
  ref <309>: DATABASE ENTRY DATE: 2003-01-15
atgggtctggagctctacctggacctgctgtcccagccctgccgcgctgtttacatctttgccaagaagaacgacattcccttcgagctgcgcatcgtggatctgattaaaggtcagcacttaagcgatgcctttgcccaggtgaaccccctcaagaaggtgccggccttgaaggacggggacttcaccttgacggagagtgtggccatcctgctctacctgacgcgcaaatataaggtccctgactactggtaccctcaggacctgcaggcccgtgcccgtgtggatgagtacctggcatggcagcacacgactctgcggagaagctgcctccgggccttgtggcataaggtgatgttccctgtgttcctgggtgggccagtatctccccagacactggcagccaccctggcagagttggatgtgaccctgcagttgctcgaggacaagttcctccagaacaaggccttccttactggtcctcacatctccttagctgacctcgtagccatcacggagctgatgcatcccgtgggtgctggctgccaagtcttcgaaggccgacccaagctggccacatggcggcagcgcgtggaggcagcagtgggggaggacctcttccaggaggcccatgaggtcattctgaaggccaaggacttcccacctgcagaccccaccataaagcagaagctgatgccctgggtgctggccatgatccggtgagctgggaaacctcacccttgcaccgtcctcagcagtccacaaagcattttcatttctaatggcccatgggagccaggcccagaaagcaggaatggcttgcttaagacttgcccaagtcccagagcacctcacctcccgaagccaccatccccaccctgtcttccacagccgcctgaaagccacaatgagaatgatgcacactgaggccttgtgtcctttaatcactgcatttcattttgattttggataataaacctggctcagcctgagcctctgcttct

SEQ ID NO: 2034 - protein, 240 aa, Homo sapiens
  ref <308>: DATABASE ACCESSION NUMBER: Refseq / NP_000844
  ref <309>: DATABASE ENTRY DATE: 2003-01-15
MGLELYLDLLSQPCRAVYIFAKKNDIPFELRIVDLIKGQHLSDAFAQVNPLKKVPALKDGDFTLTESVAILLYLTRKYKVPDYWYPQDLQARARVDEYLAWQHTTLRRSCLRALWHKVMFPVFLGGPVSPQTLAATLAELDVTLQLLEDKFLQNKAFLTGPHISLADLVAITELMHPVGAGCQVFEGRPKLATWRQRVEAAVGEDLFQEAHEVILKAKDFPPADPTIKQKLMPWVLAMIR

SEQ ID NO: 2035 - DNA, 556 bp, Rattus norvegicus
  ref <308>: DATABASE ACCESSION NUMBER: Refseq / NM_013096
  ref <309>: DATABASE ENTRY DATE: 2003-01-14
acattctccttctgatagactcaggaagcaatcatggtgctctctgcagatgacaaaaccaacatcaagaactgctgggggaagattggtggccatggtggtgaatatggcgaggaggccctacagaggatgttcgctgccttccccaccaccaagacctacttctctcacattgatgtaagccccggctctgcccaggtcaaggctcacggcaagaaggttgctgatgccttggccaaagctgcagaccacgtcgaagacctgcctggtgccctgtccactctgagcgacctgcatgcccacaaactgcgtgtggatcctgtcaacttcaagttcctgagccactgcctgctggtgaccttggcttgccaccaccctggagatttcacacccgccatgcacgcctctctggacaaattccttgcctctgtgagcactgtgctgacctccaagtaccgttaagccgcctcctgccgggcttgccttctgaccaggcccttcttccctcccttgcacctatacctcttggtctttgaataaagcctgagtaggaagc

SEQ ID NO: 2036 - protein, 142 aa, Rattus norvegicus
  ref <308>: DATABASE ACCESSION NUMBER: Refseq / NP_037228
  ref <309>: DATABASE ENTRY DATE: 2003-01-14
MVLSADDKTNIKNCWGKIGGHGGEYGEEALQRMFAAFPTTKTYFSHIDVSPGSAQVKAHGKKVADALAKAADHVEDLPGALSTLSDLHAHKLRVDPVNFKFLSHCLLVTLACHHPGDFTPAMHASLDKFLASVSTVLTSKYR

SEQ ID NO: 2037 - DNA, 466 bp, Rattus norvegicus
  ref <308>: DATABASE ACCESSION NUMBER: EMBL / AA892346
  ref <309>: DATABASE ENTRY DATE: 2000-03-03
gagttcactgggacttgctccaccaggcttgacgagcagggcagcattattcccacacgcaccatgcactctgagaagcactggaggctgctggaaagcatgaaggcacagtatgttgctgggaatggccttcggaaagtgtcctgtgtgttaagttcaaacctccggcacgtgagggtgtttgaaatggacatcgatgatgaatgggagcttgacgagtcttcagatgatgacgaggaggctgccgggaagcctgtgaagatcaaggaagaggtgttgtcagagtcggagacagaggctcaccaagatgctgctgccctagactcagacgtagtcatcaaagtggagaaacttgaccctgagttggactcctgacccagtttgacagcatgtgttagttactgtggcaaaaagacatagtgggtggactaagatggtgtgggtcacactgaattgtctgtgtatc

SEQ ID NO: 2038 - DNA, 1762 bp, Rattus norvegicus
  ref <308>: DATABASE ACCESSION NUMBER: EMBL / U39208
  ref <309>: DATABASE ENTRY DATE: 2000-03-04
gcgattggctggttcagcccagctcaacttcccgcacagcttccggcaagtcggaagccagggacaaaaagttttcaaagaagataggaggttgtggaggactcgctgctcatgagagaaggatgctacaactaagcctgtcccggctgggaatggggtccctgacagcctctccatggcatctactgctgctgggaggagcctcttggatactagcccgaattctggcctggatctataccttctatgacaactgctgccgccttcgttgcttccctcagccccctaaaccaagttggttttggggtcacttgaccttgatgaagaacaacgaggaaggcatgcagttcatagcacatctgggccgcaacttccgtgatatccacctctcttgggtgggacccgtgtacccgatcctgcgactcgtccaccctaacgtcattgctcccctgctccaagcctcagctgctgttgcacccaaggaaatgaccctctatggcttcctgaagccctggctgggggatgggctcctgatgagcgctggtgagaagtggaaccaccaccgacgcctgctgacacccgccttccactttgacatcctgaagtcctacgtgaagatttttaacaagagcgtgaacaccatgcatgccaagtggcagcgtctgactgccaagggcagtgcccgtctggacatgttcgagcacatcagcctgatgaccttggacagcctgcaaaaatgcatcttcagcttcgacagcaactgtcaggagtctaacagtgaatacatagctgcgatcctggaactcagctccctcatagtgaaacggcaacgccagcccttcctgtacctggacttcctgtattacctcactgctgatgggcggcgcttccgcaaggcctgcgacgtggtgcacaacttcacagatgctgtcatcagggagagacgcagcaccctcaatacccagggcgttgatgaattcctaaaggccagggctaagactaaaactttagactttattgatgttctcttgctggccaaggatgagcatgggaaggggctgtcggatgtggacatccgagcagaggctgacaccttcatgttcggaggtcatgacaccacggccagcgcactctcctggatcctgtacaacctggcaaggcacccggaataccaggagcgctgccggcaggaggtgcgggagctgctgagggaccgagagcctgaggagattgaatgggacgacctggcccagctgcccttcctaaccatgtgcatcaaggagagtctgcggctgcaccctccagtcttattaatctcccgctgctgttcccaggacattgtgctgccagatggccgggtcatccccaaagggaacatctgtgtcatcagcatctttggggttcaccacaatccttcagtgtggccagaccctgaggtctacaaccccttccgctttgacccagaaaacccacagaagaggtcacctctggcttttattcccttctcagcgggacccaggaactgcataggacagactttcgccatgagcgagataaaggtggcgctggcgctgacgctgctgcgcttctgcgtcctgccagatgacaaggagccgcgccggaagccggagctgatcctgcgtgcggagggcggactgtggctgcgggtggaaccgctgagcacagtgacctcacagctgccttgggacctcctcgcccaccctcctacctcttgagatctctgaataaagaattaaataag

SEQ ID NO: 2039 - DNA, 1694 bp, Homo sapiens
  ref <308>: DATABASE ACCESSION NUMBER: Refseq / NM_023944
  ref <309>: DATABASE ENTRY DATE: 2003-01-29
cgtgtgggacaagctgctcccgacagaaggatgtcgctgctgagcctgccctggctgggcctcagactggtggcaatgtccccatggctactcctgctgctggttgtgggctcctggctactcgcccgcatcctggcttggacctatgccttctataacaactgccgccggctccagtgtttcccacagcccccaaaacggaactggttttggggtcacctgggcctgatcactcctacagaggagggcttgaaggactcgacccagatgtcggccacctattcccagggctttacggtatggctgggtcccatcatccccttcatcgttttatgccaccctgacaccatccggtctatcaccaatgcctcagctgccattgcacccaaggataatctcttcatcaggttcctgaagccctggctgggagaagggatactgctgagtggcggtgacaagtggagccgccaccgtcggatgctgacgcccgccttccatttcaacatcctgaagtcctatataacgatcttcaacaagagtgcaaacatcatgcttgacaagtggcagcacctggcctcagagggcagcagtcgtctggacatgtttgagcacatcagcctcatgaccttggacagtctacagaaatgcatcttcagctttgacagccattgtcaggagaggcccagtgaatatattgccaccatcttggagctcagtgcccttgtagagaaaagaagccagcatatcctccagcacatggactttctgtattacctctcccatgacgggcggcgcttccacagggcctgccgcctggtgcatgacttcacagacgctgtcatccgggagcggcgtcgcaccctccccactcagggtattgatgattttttcaaagacaaagccaagtccaagactttggatttcattgatgtgcttctgctgagcaaggatgaagatgggaaggcattgtcagatgaggatataagagcagaggctgacaccttcatgtttggaggccatgacaccacggccagtggcctctcctgggtcctgtacaaccttgcgaggcacccagaataccaggagcgctgccgacaggaggtgcaagagcttctgaaggaccgcgatcctaaagagattgaatgggacgacctggcccagctgcccttcctgaccatgtgcgtgaaggagagcctgaggttacatcccccagctcccttcatctcccgatgctgcacccaggacattgttctcccagatggccgagtcatccccaaaggcattacctgcctcatcgatattataggggtccatcacaacccaactgtgtggccggatcctgaggtctacgaccccttccgctttgacccagagaacagcaaggggaggtcacctctggcttttattcctttctccgcagggcccaggaactgcatcgggcaggcgttcgccatggcggagatgaaagtggtcctggcgttgatgctgctgcacttccggttcctgccagaccacactgagccccgcaggaagctggaattgatcatgcgcgccgagggcgggctttggctgcgggtggagcccctgaatgtaggcttgcagtgactttctgacccatccacctgtttttttgcagattgtcatgaataaaacggtgctgtcacctctgcctgggcctcactgacagcctgcag

SEQ ID NO: 2040 - protein, 524 aa, Homo sapiens
  ref <308>: DATABASE ACCESSION NUMBER: Refseq / NP_076433
  ref <309>: DATABASE ENTRY DATE: 2003-01-29
MSLLSLPWLGLRLVAMSPWLLLLLVVGSWLLARILAWTYAFYNNCRRLQCFPQPPKRNWFWGHLGLITPTEEGLKDSTQMSATYSQGFTVWLGPIIPFIVLCHPDTIRSITNASAAIAPKDNLFIRFLKPWLGEGILLSGGDKWSRHRRMLTPAFHFNILKSYITIFNKSANIMLDKWQHLASEGSSRLDMFEHISLMTLDSLQKCIFSFDSHCQERPSEYIATILELSALVEKRSQHILQHMDFLYYLSHDGRRFHRACRLVHDFTDAVIRERRRTLPTQGIDDFFKDKAKSKTLDFIDVLLLSKDEDGKALSDEDIRAEADTFMFGGHDTTASGLSWVLYNLARHPEYQERCRQEVQELLKDRDPKEIEWDDLAQLPFLTMCVKESLRLHPPAPFISRCCTQDIVLPDGRVIPKGITCLIDIIGVHHNPTVWPDPEVYDPFRFDPENSKGRSPLAFIPFSAGPRNCIGQAFAMAEMKVVLALMLLHFRFLPDHTEPRRKLELIMRAEGGLWLRVEPLNVGLQ

SEQ ID NO: 2041 - DNA, 498 bp, Rattus norvegicus
  ref <308>: DATABASE ACCESSION NUMBER: EMBL / AI639012
  ref <309>: DATABASE ENTRY DATE: 2000-03-04
tcagtcattcacctacgggtgagcaggctccacaggcagaagagcagggttttccagccagctcctgaggacagtggccactggctgggccatgtcacaacactgttgcagtgtggagtacgaccagggcatggagaattcctcttcactggacatgtgcactttggggaggcacaacttggatgtgccccacgctttagtgactttcaaaagatgtacaggaaagcagaagaaaggggcataaacccttgtgaaataaatatggagtgacttgcagggtgacaccgtactgctgtccttcagatgagccatggctcagttgctctatcaaatcccgatagagattgcagactggtggcatgagccccgcctggtgcttgaactgggaagggaggtacatgctgctctgaccccttaggtcccattcaaggatgccctgacccattggaaatgttgtaaaatgcaaactaagttattatatttttttttgtaaaagaa

SEQ ID NO: 2042 - DNA, 10705 bp, Rattus norvegicus
  ref <308>: DATABASE ACCESSION NUMBER: Refseq / NM_013070
  ref <309>: DATABASE ENTRY DATE: 2003-01-14
aaaaaaggaaaaccaaaattctcctaaggtccaacgcaagctccccactacccgaacacgcccagaggaaccctggggcctctgggacttggttagcaggtattcatggtagcctggaccattattccgaggtagtcttcagaagaggatctgggaaagcctttggattatattgaaactcatccaagatggccaagtacgggcaccttgaagccagccctgatgatgggcagaatcagttcagtgatatcattaagtccagatctgatgaacacaacgatgtacagaagaaaacctttaccaaatggataaacgctcgattttcaaagagtgggaaaccacccatcaatgatatgttctcagacctcaaagatgggagaaagctcttggatcttctagaaggcctcacaggaacatcattgccaaaggaacgtggttccacaagggtgcatgccttaaataatgtcaaccgggtgctgcaggttttacatcagaacaatgtggagctggtgaatatcggaggcactgacattgtggatggaaatcccaagctgacgctgggtttgctgtggagtattattctgcactggcaggtgaaggatgtcatgaaagatatcatgtcagacctgcagcagacgaacagcgagaagatcctgctgagctgggtacggcagaccaccaggccctacagccaagtcaacgtcctcaacttcaccaccagctggacagatggactcgcattcaacgccgtgctccaccggcacaaaccagatctcttcagctgggacagagtggtcaaaatgtccccaactgagagacttgaacatgcttttagcaaggcccatacttatttggggattgaaaaacttctggatcctgaagatgttgccgtgcagctccctgacaagaaatccataattatgtatttaacgtctctgtttgaggtgcttcctcagcaagtcactatagacgccattcgagaggtggagacgctccccaggaagtacaagaaagaatgtgaaggggaagaaattaatatccagagtgcagtgctgacagaggaaggccagagtccccgagctgagacgcccagcacagtcaccgaggttgacatggatttggacagctaccagatagcactagaggaagtactgacatggctgctgtctgcggaggacacgttccaggagcaagatgacatttctgatgatgtcgaggacgtcaaagagcagtttgctacccatgaaacatttatgatggagctgagtgcgcaccagagcagcgtggggagtgtcctgcaggctggcaaccaactgatgacacaaggcactctgtcggatgaggaggagtttgagattcaggagcagatgaccttgctgaacgccagatgggaggcgctccgggtagagagcatggagagacagtcccggttgcatgatgccctgatggaactgcagaagaaacagctgcagcagctctcaggctggctgaccctcacagaggagcgcattcagaagatggaaagcctcccagtgggtgacgacctaccctccctgcaaaacctgcttgaagaacataaaagtttgcaaagtgacctcgaagctgagcaggtgaaggtgaattccttaactcatatggtggtgattgtggatgaaaacagtggggagagcgccacagctgttttggaagatcagttacagaaactgggtgagcgctggacagctgtatgccgctggactgaagaacgttggaacaggttgcaagaaatcaatattttgtggcaggaattattggaagaacagtgtcttttggaagcttggctcaccgaaaaggaagaggctttgaataaagtccaaactggcaactttaaagaccagaaggaactcggtgtcagtgtccggcgtctggctattttgaaggaagacatggaaatgaagaggcagactctggaccaactgagtgagattggccaagacgtgggccaattgctcagtaatcccaaggcatctgagaagatgaacagcgactctgaggagctaacccagagatgggactctttggttcagagactagaagactcttctaaccaggtgactcaggctgtagcaaagctcggcatgtcccagattcctcagaaggatcttttggagaccgttcatgtaagagaacaaggaatgataaagaagcctaagcaggagctgcctcctcctcccccaccgaagaagagacagatccacgtggatgtggaggccaagaaaaagtttgatgccacaagtgcagaactgcagagctggattttgagatcaaaggctgccctccagaacacagagatgaacgagtataagaagtcgcaggagacctcgggagtgagaaagaaatggaagggattagaaaaagaacaaaaggaaaagatcccccagctggatgaactgaatcaaaccggacaaatccttcaggagcaaatgggaaaagaaggccttttggctgaagaaataaacgacgttctggaaagggttttgttggagtggaagatgatctctcagcagctggaagatctgggaaggaagatccagctgcaggaggatataaatgcttattttaggcagcttgatgctctcgaaaagaccatcagggcgaaggaagagtggctgagggatgcatccttttctgaatcaccccagcggtctttgccaagcttaaaggattcctgccagagggaactgacagacctccttggccttcaccccagaattgagatactgtgtgcaagctgttcagccctgaggtctcagccctctgtcccaggttttgtccagcagggttttgatgaccttcgacgtcactaccaggctgtgcagaaggctttagaggaataccaacaacagctagaaaatgagctgaagagccagcctgaacctgcgtatttggacacactgaacactctgaaaaaaatgctaagcgagtcagaaaaagcagcccaggcctctctgagtgccctgaacgatccctcagcggtggagcaggccctgcaggagaaaaaggcccttgatgaaacccttgagaatcaaaaacctacattgcataaactttcagaagaaacgaaggctttggagaaaaatatgcttcctgatgtggggaaaacgtacagacaagaatttgatgatgcccaaggcaaatggaataaagtaaagaccaaggtttccagagatttacgttcgcttgaggaaatcatccccagactcagagattttaaggctgattcagaagtcatcgagaagtggacgaatggcgtgaaagacttcctaatgaaagagcaggctgcccaaggagataccactgccctgcagaggcagcttgaccaatgcaccacatttgccaatgaaatcgaaacaatcgagtcatctctgaaaaacctgagggacatagagactagccttcagaggtgtcccgtcactggagtcaagacatgggtacagacaagactagcggattaccaatcccaactggagaaattcagccaagagattgatattcaaaagagcaggttgtctgacagtcaggagaaagccatgaacttgaagaaggatttggctgagatgcaggagtggatggctcaggccgaagaggactatctggagagggacttcgagtacaagtctccagaagaacttgaaagtgcagtggaggagatgaagagggccaaagaggacgtgctgcagaaggaggtgagggtgaaaattctcaaggacagcatcaagctcgtggctgccagggtgccctctggtggccaggagctgacatcggagttcaacgaggtgctggagagctaccagcttctctgtaataggattcgagggaagtgccacacactagaggaggtctggtcgtgttgggtggagctgcttcactatctggatctggaaaccgcgtggttgaacactttggaggagcgcatgcagagcacagaggccctgcctgagagggcagaagctgttcacgacgctctggagtctcttgagtctgttttgcgtcatccagcggataatcgcacccagattcgggaacttgggcagactctgattgatggtgggatcctggatgacatcatcagcgagaagctggaggcttttaacagccgctatgaagagctgagtcacttggcggagagcaaacagatctctttggagaagcaactccaggtcctccgcgaaactgaccacatgcttcaggtgctgaaggagagcctaggggagctggacaagcagcttaccacatacctgacggacaggattgatgccttccaactgccccaggaagctcagaagatccaagcagaaatctcagcccatgagctcaccctggaggagctgaaaaagaatgtccgccctcagccccccacctcccctgagggcagaaccacaagaggagggagtcagatggacctgctccagaggaaactccgagaggtttccaccaaattccagcttttccagaagcccgcgaatttcgagcagcggatgcttgactgcaagcgcgtgctggatggcgtgaaggccgagctccacgtcctcagtgtgaaggatgtggaccccgacgtcatccagacccacttggacaagtgcatgaaactatataaaacgttgagcgaggtcaagcttgaagttgagactgtcatcaagacagggaggcacattgtccagaagcagcagacggacaacccaaaaggcatggatgagcagctcacttctctgaaagtcctctacaatgacctgggtgcacaggtgacagaagggaagcaggacctggaaagagcctcacagctgtccaggaagttgaagaaggaggctgccatcctctctgaatggctctctaccacagaggctgaactagtgcagaaatctgcctcagaaggggtgatcggtgacctggacacagaaatctcctgggctaaaaacattctcaaggatctggaaaagagaaaagttgacttaaacaccatcacagagagtagtgctgcccttcaacacttggtggtgggcagtgagtctgttttagaagataccctatgtgtgctcaacgctgggtggagccgagtccgcacgtggaccgaggactggcgtaataccttgctgaaccaccagaaccagctggaggtctttgatggacatgttgcccacatcagtacctgtctctatcaagccgaagctctattggatgagatcgaaaagaaaccggcgagtaaacaggaagaaatcgtgaagcgtttactgtcagaactgagtgatgccagcatccaggttgagaatgttcgggaacaagccatcgtcctggtgaatgctcgtggaagctccagcagggaacttgtggaaccaaaattagctgaactgggcaagaactttgaaaaggtgtcccagcacataaacagtgcccaaatgctgattggtcaggatcctgctggaactgttgaagctgttgggcctttctctgacttggaaagcttagagagtgacatagaaaacatgttgaaagttgtggaaaagcacttggaccccagtaatgatgagaagatggatgaggagcgagcccagattgaggaagttctacaaagaggggagcatttgttacatgaaccaatggaggacagtaagaaagaaaagatccgtttgcagttactacttttgcatacacgttacaacaaaatcaaggcaatcccgcagagaaaaacaattccgctttcttctggaattatgtcatctgccctccctgcggattatctggttgaaattaataaaattttgctcactctagatgacattgaattatcgcttaatattcctgaactaaacaccactgtctacgaagacttctctttccaggaagactctctgaagagaatcaaagatcagctggacagactcggagagcagctcgcagcagttcatgagaagcagcccgatgtcatcctcgaagcctctggtcccgaagccattcagatcagggacatgctctctcagctgaacgcaaagtgggacagagtgaataggttatacagcgaccggagagggtccttcgccagggctgtggaagaatggaagcagttccactgtgaccttgatgacctcacgcagtggctgtctgaagctgaggacctgctggtaggcacttgtgctccagatggcagcctggacctggagaaagctaggacacaccagctggaactggaagacggcctcagcagccaccagccctgcttgattgatgtaaaccaaaagggagaagacattgtacagagactccgcccctcagatgcaagctttctgaaggataaactggccagtttaaaccagcgctggagtgctcttgtagctgaggtgaaggatctgcagcccaggctaaaaggagaaagtaagcaggtgtcggggtacaggaaacggctggatgaggtcgtctgctggttaacaaaagtggagaactcggtgcagaagagatcaacccctgacccggaagaaaacccgtgggaattaacagatttagcccaagagatggacgctcaggctgaaaacattaagtggctgaacagagccgaactggaaatgctttcagacaaaaatctgagtttgtgcgagagagataatctttcagaaagcttgaggaatgtaaatacaatgtggaccaagatatgcagagaggtgcctagcctactgaagacacgcacccaagacccctgctctgccccacagacaaggattgctgctcatcccaatgtccaaaaggtggcgctagtatcatctgcatcggatgctcctctgcgtggccccgagatctcagttcctgctgatttggataaaaccatcaccgaactggctgactggctggtgttgatcgaccaaatgctgaagtccaacattgtcactgtgggggacgtgaaggagatcaataagacagtttcccggatgaaaatcacaaaggctgacttagaacagcgccatcctcagctggattttgtattcacattggcccagaatttgaaaaacaaagcttccagttcagatttgagaacagcaatcacgggaaaattggaaaagctgaagacccagtgggagagtacccagcatggcgtggagctgcggcggcagcagttggaggacatggtcgtggacagcctgcagtgggacgaccacagagaagagacggaagagctcatgaggaaacacgaggcccgcttctacatgcttcagcaggcccgccgggacccgcttagcaaacaagtttctgacaatcaactcttgcttcaagaactgggttctggcgatggtgtcatcatggcatttgataacgtcctgcagaaacttctggaagaatacagtagtgatgacaccaggaatgtggaagaaaccacagagtacttgaaaacgtcatggatcaatctcaaacaaagcattgctgatagacagagtgccttggaggctgagctgcggacagtgcagacgtctcgtagagacctggagaactttgtcaagtggcttcaggaagcagaaaccacagcaaatgtgctggccgatgcctctcagcgggagaatgctcttcaggacagtgtcctggccaggcagctcagacagcagatgctggacatccaggcagaaattgatgcccacaatgacatatttaaaagcatcgatgggaacaggcagaagatggtgaaggctctggggaattctgaggaggccacaatgcttcagcatcgcctggatgacatgaaccaaagatggaatgatctgaaggcaaaatctgccagcatcagggcccatttggaggccagtgctgagaaatggaacaggttgctggcatcgctggaagagctgatcaaatggctcaacatgaaagacgaagagcttaagaagcagatgcccattggaggggacgttcccgccttacagctccagtatgaccactgcaaggtgctgagacgtgagctaaaggagaaagaatattctgtgctgaacgccgtagatcaagctcgagtgtttctggctgatcagccgatagaggcccctgaagaacccagaaggaacccacagtcaaagacagagttgactccggaggagagagcccagaagatcgccaaggccatgcgcaaacagtcctctgaagtcagagagaagtgggagagtctaaatgctgtgactagcacctggcaaaagcaagtaggaaaggcgttagagaaactccgagaccttcagggagccgtggatgacctcgacgcggacatgaaggaggtggaggccgtgcgcaatggctggaagcccgtgggggacctgcttatcgactcgctgcaggatcacatagagaaaaccctggcgtttagagaagaaattgcaccaatcaatctaaaagttaaaacaatgaatgacctgtccagtcagctgtccccactcgacctgcatccgtctccaaagatgtctcgccagctggatgacctcaatatgcgatggaaacttctccaggtttcggtggaggatcggctcaagcagctccaggaagcccacagagattttgggccatgttcccaacactttctgtccacttcagtccagctgccgtggcagagatccatttcgcataataaagtgccctattacatcaaccatcaaacacagacaacctgttgggatcatcctaaaatgactgaactctttcaatcccttggtgatctgaataatgtacgtttctctgcctaccgcacagccatcaaaatccgaaggctgcagaaagcactatgcttggatctcttagaactgaacacaacaaatgaagttttcaagcagcacaaactgaatcaaaatgatcagctcctgagtgtcccagatgtcatcaactgtctgaccacaacttacgatgggcttgaacaactgcacaaagacttggtcaatgttccactctgcgtcgatatgtgtctcaactggctgctcaacgtatatgacacgggccggactggaaaaattagagtacagagtctgaagattggattgatgtctctctccaaaggcctcttagaagaaaaataccgatgtctctttaaggaggtggcagggccaacagagatgtgcgaccagcggcagcttggcctgctacttcacgatgccatccagatcccgaggcagctgggggaagtagcagcctttgggggcagtaacattgagcccagtgtccgaagctgtttccagcagaataacaacaagccagaaatcagtgtgaaggagtttatagactggatgcggttggagccacagtccatggtgtggttgccggttctgcaccgtgtggcagctgcagagactgcaaaacatcaggccaaatgcaacatctgcaaagaatgtccgatcgttgggttcaggtacaggagcctaaagcatttcaactatgacgtctgccagagctgcttcttttccggaagaacagccaagggccacaaattacattacccaatggtggaatactgtataccaacaacatctggggaagacgtgcgagatttcacaaaagtactgaagaacaagttcaggtccaagaagtattttgccaaacacccccggcttggctacctgcctgtccagaccgtgctcgaaggagacaacttagagactcctatcacgctcatcagtatgtggccagagcactatgacccctcccagtcccctcagctgtttcatgatgacactcactcaagaatagagcaatacgccacacgactggcccagatggaaaggacaaatggatccttcctaactgacagcagctctaccacgggaagtgtggaggacgagcatgccctcatccagcagtactgccagacgctgggcggggagtctcctgtgagccagccacagagtccagctcagatcctgaagtctgtggagaaggaagagcgtggggaactggagcggatcattgctgacttggaggaagagcaaagaaatctgcaggtggagtatgagcagctgaaggagcaacacctaagaaggggtctccccctgggctcccctccagactccattgtatcccctcaccacacgtccgaggactcggaactgatagcggaagctaaactccttcggcagcacaaagggcggctggaggcgaggatgcagattctggaagatcacaataaacagctggagtctcagctgcatcgcctcagacagctcctggagcagcctgactctgattcccgcatcaatggtgtctccccctgggcttccccacagcatccttcattgagctactcgcttgaccccgacccaggcccacagtcccaccaggcagcatctgaggacctgctggccccgcctcatgacaccagcacggacctcacagatgtgatggagcagctcaacagcacgtttccctcctgcagcccaaatgtccccagcaggccacaggcaatttgaagcatttatccagccaaccaacgtttcccgaccttcagtattgccctcttctgcaaatgccaaccccattcaacctgatgctccgtggctcccagacacttgcctttgagtgctgaccaggtgttctactgagggaatcaaacaccgactatccaaagagaaaaggatgctttgtttttataataacgtatattattgtttccttcttccctttctatgcaactgtaaattaatgaacagagaaggatttgaggtgt

SEQ ID NO: 2043 - protein, 3419 aa, Rattus norvegicus
  ref <308>: DATABASE ACCESSION NUMBER: Refseq / NP_037202
  ref <309>: DATABASE ENTRY DATE: 2003-01-14
MAKYGHLEASPDDGQNQFSDIIKSRSDEHNDVQKKTFTKWINARFSKSGKPPINDMFSDLKDGRKLLDLLEGLTGTSLPKERGSTRVHALNNVNRVLQVLHQNNVELVNIGGTDIVDGNPKLTLGLLWSIILHWQVKDVMKDIMSDLQQTNSEKILLSWVRQTTRPYSQVNVLNFTTSWTDGLAFNAVLHRHKPDLFSWDRVVKMSPTERLEHAFSKAHTYLGIEKLLDPEDVAVQLPDKKSIIMYLTSLFEVLPQQVTIDAIREVETLPRKYKKECEGEEINIQSAVLTEEGQSPRAETPSTVTEVDMDLDSYQIALEEVLTWLLSAEDTFQEQDDISDDVEDVKEQFATHETFMMELSAHQSSVGSVLQAGNQLMTQGTLSDEEEFEIQEQMTLLNARWEALRVESMERQSRLHDALMELQKKQLQQLSGWLTLTEERIQKMESLPVGDDLPSLQNLLEEHKSLQSDLEAEQVKVNSLTHMVVIVDENSGESATAVLEDQLQKLGERWTAVCRWTEERWNRLQEINILWQELLEEQCLLEAWLTEKEEALNKVQTGNFKDQKELGVSVRRLAILKEDMEMKRQTLDQLSEIGQDVGQLLSNPKASEKMNSDSEELTQRWDSLVQRLEDSSNQVTQAVAKLGMSQIPQKDLLETVHVREQGMIKKPKQELPPPPPPKKRQIHVDVEAKKKFDATSAELQSWILRSKAALQNTEMNEYKKSQETSGVRKKWKGLEKEQKEKIPQLDELNQTGQILQEQMGKEGLLAEEINDVLERVLLEWKMISQQLEDLGRKIQLQEDINAYFRQLDALEKTIRAKEEWLRDASFSESPQRSLPSLKDSCQRELTDLLGLHPRIEILCASCSALRSQPSVPGFVQQGFDDLRRHYQAVQKALEEYQQQLENELKSQPEPAYLDTLNTLKKMLSESEKAAQASLSALNDPSAVEQALQEKKALDETLENQKPTLHKLSEETKALEKNMLPDVGKTYRQEFDDAQGKWNKVKTKVSRDLRSLEEIIPRLRDFKADSEVIEKWTNGVKDFLMKEQAAQGDTTALQRQLDQCTTFANEIETIESSLKNLRDIETSLQRCPVTGVKTWVQTRLADYQSQLEKFSQEIDIQKSRLSDSQEKAMNLKKDLAEMQEWMAQAEEDYLERDFEYKSPEELESAVEEMKRAKEDVLQKEVRVKILKDSIKLVAARVPSGGQELTSEFNEVLESYQLLCNRIRGKCHTLEEVWSCWVELLHYLDLETAWLNTLEERMQSTEALPERAEAVHDALESLESVLRHPADNRTQIRELGQTLIDGGILDDIISEKLEAFNSRYEELSHLAESKQISLEKQLQVLRETDHMLQVLKESLGELDKQLTTYLTDRIDAFQLPQEAQKIQAEISAHELTLEELKKNVRPQPPTSPEGRTTRGGSQMDLLQRKLREVSTKFQLFQKPANFEQRMLDCKRVLDGVKAELHVLSVKDVDPDVIQTHLDKCMKLYKTLSEVKLEVETVIKTGRHIVQKQQTDNPKGMDEQLTSLKVLYNDLGAQVTEGKQDLERASQLSRKLKKEAAILSEWLSTTEAELVQKSASEGVIGDLDTEISWAKNILKDLEKRKVDLNTITESSAALQHLVVGSESVLEDTLCVLNAGWSRVRTWTEDWRNTLLNHQNQLEVFDGHVAHISTCLYQAEALLDEIEKKPASKQEEIVKRLLSELSDASIQVENVREQAIVLVNARGSSSRELVEPKLAELGKNFEKVSQHINSAQMLIGQDPAGTVEAVGPFSDLESLESDIENMLKVVEKHLDPSNDEKMDEERAQIEEVLQRGEHLLHEPMEDSKKEKIRLQLLLLHTRYNKIKAIPQRKTIPLSSGIMSSALPADYLVEINKILLTLDDIELSLNIPELNTTVYEDFSFQEDSLKRIKDQLDRLGEQLAAVHEKQPDVILEASGPEAIQIRDMLSQLNAKWDRVNRLYSDRRGSFARAVEEWKQFHCDLDDLTQWLSEAEDLLVGTCAPDGSLDLEKARTHQLELEDGLSSHQPCLIDVNQKGEDIVQRLRPSDASFLKDKLASLNQRWSALVAEVKDLQPRLKGESKQVSGYRKRLDEVVCWLTKVENSVQKRSTPDPEENPWELTDLAQEMDAQAENIKWLNRAELEMLSDKNLSLCERDNLSESLRNVNTMWTKICREVPSLLKTRTQDPCSAPQTRIAAHPNVQKVALVSSASDAPLRGPEISVPADLDKTITELADWLVLIDQMLKSNIVTVGDVKEINKTVSRMKITKADLEQRHPQLDFVFTLAQNLKNKASSSDLRTAITGKLEKLKTQWESTQHGVELRRQQLEDMVVDSLQWDDHREETEELMRKHEARFYMLQQARRDPLSKQVSDNQLLLQELGSGDGVIMAFDNVLQKLLEEYSSDDTRNVEETTEYLKTSWINLKQSIADRQSALEAELRTVQTSRRDLENFVKWLQEAETTANVLADASQRENALQDSVLARQLRQQMLDIQAEIDAHNDIFKSIDGNRQKMVKALGNSEEATMLQHRLDDMNQRWNDLKAKSASIRAHLEASAEKWNRLLASLEELIKWLNMKDEELKKQMPIGGDVPALQLQYDHCKVLRRELKEKEYSVLNAVDQARVFLADQPIEAPEEPRRNPQSKTELTPEERAQKIAKAMRKQSSEVREKWESLNAVTSTWQKQVGKALEKLRDLQGAVDDLDADMKEVEAVRNGWKPVGDLLIDSLQDHIEKTLAFREEIAPINLKVKTMNDLSSQLSPLDLHPSPKMSRQLDDLNMRWKLLQVSVEDRLKQLQEAHRDFGPCSQHFLSTSVQLPWQRSISHNKVPYYINHQTQTTCWDHPKMTELFQSLGDLNNVRFSAYRTAIKIRRLQKALCLDLLELNTTNEVFKQHKLNQNDQLLSVPDVINCLTTTYDGLEQLHKDLVNVPLCVDMCLNWLLNVYDTGRTGKIRVQSLKIGLMSLSKGLLEEKYRCLFKEVAGPTEMCDQRQLGLLLHDAIQIPRQLGEVAAFGGSNIEPSVRSCFQQNNNKPEISVKEFIDWMRLEPQSMVWLPVLHRVAAAETAKHQAKCNICKECPIVGFRYRSLKHFNYDVCQSCFFSGRTAKGHKLHYPMVEYCIPTTSGEDVRDFTKVLKNKFRSKKYFAKHPRLGYLPVQTVLEGDNLETPITLISMWPEHYDPSQSPQLFHDDTHSRIEQYATRLAQMERTNGSFLTDSSSTTGSVEDEHALIQQYCQTLGGESPVSQPQSPAQILKSVEKEERGELERIIADLEEEQRNLQVEYEQLKEQHLRRGLPLGSPPDSIVSPHHTSEDSELIAEAKLLRQHKGRLEARMQILEDHNKQLESQLHRLRQLLEQPDSDSRINGVSPWASPQHPSLSYSLDPDPGPQSHQAASEDLLAPPHDTSTDLTDVMEQLNSTFPSCSPNVPSRPQAI

SEQ ID NO: 2044 - DNA, 10302 bp, Homo sapiens
  ref <308>: DATABASE ACCESSION NUMBER: Refseq / NM_007124
  ref <309>: DATABASE ENTRY DATE: 2000-11-02
atggccaagtatggagaacatgaagccagtcctgacaatgggcagaacgaattcagtgatatcattaagtccagatctgatgaacacaatgacgtacagaagaaaacctttaccaaatggataaatgctcgattttcaaagagtgggaaaccacccatcaatgatatgttcacagacctcaaagatggaaggaagctattggatcttctagaaggcctcacaggaacatcactgccaaaggaacgtggttccacaagggtacatgccttaaataacgtcaacagagtgctgcaggttttacatcagaacaatgtggaattagtgaatatagggggaactgacattgtggatggaaatcacaaactgactttggggttactttggagcatcattttgcactggcaggtgaaagatgtcatgaaggatgtcatgtcggacctgcagcagacgaacagtgagaagatcctgctcagctgggtgcgtcagaccaccaggccctacagccaagtcaacgtcctcaacttcaccaccagctggacagatggactcgcctttaatgctgtcctccaccgacataaacctgatctcttcagctgggataaagttgtcaaaatgtcaccaattgagagacttgaacatgccttcagcaaggctcaaacttatttgggaattgaaaagctgttagatcctgaagatgttgccgttcggcttcctgacaagaaatccataattatgtatttaacatctttgtttgaggtgctacctcagcaagtcaccatagacgccatccgtgaggtagagacactcccaaggaaatataaaaaagaatgtgaagaagaggcaattaatatacagagtacagcgcctgaggaggagcatgagagtccccgagctgaaactcccagcactgtcactgaggtcgacatggatctggacagctatcagattgcgttggaggaagtgctgacctggttgctttctgctgaggacactttccaggagcaggatgatatttctgatgatgttgaagaagtcaaagaccagtttgcaacccatgaagcttttatgatggaactgactgcacaccagagcagtgtgggcagcgtcctgcaggcaggcaaccaactgataacacaaggaactctgtcagacgaagaagaatttgagattcaggaacagatgaccctgctgaatgctagatgggaggctcttagggtggagagtatggacagacagtcccggctgcacgatgtgctgatggaactgcagaagaagcaactgcagcagctctccgcctggttaacactcacagaggagcgcattcagaagatggaaacttgccccctggatgatgatgtaaaatctctacaaaagctgctagaagaacataaaagtttgcaaagtgatcttgaggctgaacaggtgaaagtaaattcactaactcacatggtggtcattgttgatgaaaacagtggtgagagcgctacagctatcctagaagaccagttacagaaacttggtgagcgctggacagcagtatgccgttggactgaagaacgctggaataggttacaagaaatcaatatattgtggcaggaattattggaagaacagtgcttgttgaaagcttggttaaccgaaaaagaagaggctttaaataaagtccagacaagcaacttcaaagaccaaaaggaactaagtgtcagtgttcgacgtctggctattttgaaggaagacatggaaatgaagcgtcaaacattggatcagctgagtgagattggccaggatgtgggacaattacttgataattccaaggcatctaagaagatcaacagtgactcagaggaactgactcaaagatgggattctttggttcagagactagaagattcctccaaccaggtgactcaggctgtagcaaagctggggatgtctcagattcctcagaaggaccttttggagactgttcgtgtaagagaacaagcaattacaaaaaaatctaagcaggaactgcctcctcctcctcccccaaagaagagacagatccatgtggatattgaagctaagaaaaagtttgatgctataagtgcagagctgttgaactggattttgaaatggaaaactgccattcagaccacagagataaaagagtatatgaagatgcaagacacttccgaaatgaaaaagaagttgaaggcattagaaaaagaacagagagaaagaatccccagagcagatgaattaaaccaaactggacaaatccttgtggagcaaatgggaaaagaaggccttcctactgaagaaataaaaaatgttctggagaaggtttcatcagaatggaagaatgtatctcaacatttggaagatctagaaagaaagattcagctacaggaagatataaatgcttatttcaagcagcttgatgagcttgaaaaggtcatcaagacaaaggaggagtgggtaaaacacacttccatttctgaatcttcccggcagtccttgccaagcttgaaggattcctgtcagcgggaattgacaaatcttcttggccttcaccccaaaattgaaatggctcgtgcaagctgctcggccctgatgtctcagccttctgccccagattttgtccagcggggcttcgatagctttctgggccgctaccaagctgtacaagaggctgtagaggatcgtcaacaacatctagagaatgaactgaagggccaacctggacatgcatatctggaaacattgaaaacactgaaagatgtgctaaatgattcagaaaataaggcccaggtgtctctgaatgtccttaatgatcttgccaaggtggagaaggccctgcaagaaaaaaagacccttgatgaaatccttgagaatcagaaacctgcattacataaacttgcagaagaaacaaaggctctggagaaaaatgttcatcctgatgtagaaaaattatataagcaagaatttgatgatgtgcaaggaaagtggaacaagctaaaggtcttggtttccaaagatctacatttgcttgaggaaattgctctcacactcagagcttttgaggccgattcaacagtcattgagaagtggatggatggcgtgaaagacttcttaatgaaacagcaggctgcccaaggagacgacgcaggtctacagaggcagttagaccagtgctctgcatttgttaatgaaatagaaacaattgaatcatctctgaaaaacatgaaggaaatagagactaatcttcgaagtggtccagttgctggaataaaaacttgggtgcagacaagactaggtgactaccaaactcaactggagaaacttagcaaggagatcgctactcaaaaaagtaggttgtctgaaagtcaagaaaaagctgcgaacctgaagaaagacttggcagagatgcaggaatggatgacccaggccgaggaagaatatttggagcgggattttgagtacaagtcaccagaagagcttgagagtgctgtggaagagatgaagagggcaaaagaggatgtgttgcagaaggaggtgagagtgaagattctcaaggacaacatcaagttattagctgccaaggtgccctctggtggccaggagttgacgtctgagctgaatgttgtgctggagaattaccaacttctttgtaatagaattcgaggaaagtgccacacgctagaggaggtctggtcttgttggattgaactgcttcactatttggatcttgaaactacctggttaaacactttggaagagcggatgaagagcacagaggtcctgcctgagaagacggatgctgtcaacgaagccctggagtctctggaatctgttctgcgccacccggcagataatcgcacccagattcgagagcttggccagactctgattgatggggggatcctggatgatataatcagtgagaaactggaggctttcaacagccgatatgaagatctaagtcacctggcagagagcaagcagatttctttggaaaagcaactccaggtgctgcgggaaactgaccagatgcttcaagtcttgcaagagagcttgggggagctggacaaacagctcaccacatacctgactgacaggatagatgctttccaagttccacaggaagctcagaaaatccaagcagagatctcagcccatgagctaaccctagaggagttgagaagaaatatgcgttctcagcccctgacctccccagagagtaggactgccagaggaggaagtcagatggatgtgctacagaggaaactccgagaggtgtccacaaagttccagcttttccagaagccagctaacttcgagcagcgcatgctggactgcaagcgtgtgctggatggcgtgaaagcagaacttcacgttctggatgtgaaggacgtagaccctgacgtcatacagacgcacctggacaagtgtatgaaactgtataaaactttgagtgaagtcaaacttgaagtggaaactgtgattaaaacaggaagacatattgtccagaaacagcaaacggacaacccaaaagggatggatgagcagctgacttccctgaaggttctttacaatgacctgggcgcacaggtgacagaaggaaaacaggatctggaaagagcatcacagttggcccggaaaatgaagaaagaggctgcttctctctctgaatggctttctgctactgaaactgaattggtacagaagtccacttcagaaggtctgcttggtgacttggatacagaaatttcctgggctaaaaatgttctgaaggatctggaaaagagaaaagctgatttaaataccatcacagagagtagtgctgccctgcaaaacttgattgagggcagtgagcctattttagaagagaggctctgcgtccttaacgctgggtggagccgagttcgtacctggactgaagattggtgcaataccttgatgaaccatcagaaccagctagaaatatttgatgggaacgtggctcacataagtacctggctttatcaagctgaagctctattggatgaaattgaaaagaaaccaacaagtaaacaggaagaaattgtgaagcgtttagtatctgagctggatgatgccaacctccaggttgaaaatgtccgcgatcaagcccttattttgatgaatgcccgtggaagctcaagcagggagcttgtagaaccaaagttagctgagctgaataggaactttgaaaaggtgtctcaacatatcaaaagtgccaaattgctaattgctcaggaaccattataccaatgtttggtcaccactgaaacatttgaaactggtgtgcctttctctgacttggaaaaattagaaaatgacatagaaaatatgttaaaatttgtggaaaaacacttggaatccagtgatgaagatgaaaagatggatgaggagagtgcccagattgaggaagttctacaaagaggagaagaaatgttacatcaacctatggaagataataaaaaagaaaagatccgtttgcaattattacttttgcatactagatacaacaaaattaaggcaatccctattcaacagaggaaaatgggtcaacttgcttctggaattagatcatcacttcttcctacagattatctggttgaaattaacaaaattttactttgcatggatgatgttgaattatcgcttaatgttccagagctcaacactgctatttacgaagacttctcttttcaggaagactctctgaagaatatcaaagaccaactggacaaacttggagagcagattgcagtcattcatgaaaaacagccagatgtcatccttgaagcctctggacctgaagccattcagatcagagatacacttactcagctgaatgcaaaatgggacagaattaatagaatgtacagtgatcggaaaggttgttttgacagggcaatggaagaatggagacagttccattgtgaccttaatgacctcacacagtggataacagaggctgaagaattactggttgatacctgtgctccaggtggcagcctggacttagagaaagccaggatacatcagcaggaacttgaggtgggcatcagcagccaccagcccagttttgcagcactaaaccgaactggggatgggattgtgcagaaactctcccaggcagatggaagcttcttgaaagaaaaactggcaggtttaaaccaacgctgggatgcaattgttgcagaagtgaaggataggcagccaaggctaaaaggagaaagtaagcaggtgatgaagtacaggcatcagctagatgagattatctgttggttaacaaaggctgagcatgctatgcaaaagagatcaaccaccgaattgggagaaaacctgcaagaattaagagacttaactcaagaaatggaagtacatgctgaaaaactcaaatggctgaatagaactgaattggagatgctttcagataaaagtctgagtttacctgaaagggataaaatttcagaaagcttaaggactgtaaatatgacatggaataagatttgcagagaggtgcctaccaccctgaaggaatgcatccaggagcccagttctgtttcacagacaaggattgctgctcatcctaatgtccaaaaggtggtgctagtatcatctgcgtcagatattcctgttcagtctcatcgtacttcggaaatttcaattcctgctgatcttgataaaactataacagaactagccgactggctggtattaatcgaccagatgctgaagtccaacattgtcactgttggggatgtagaagagatcaataagaccgtttcccgaatgaaaattacaaaggctgacttagaacagcgccatcctcagctggattatgtttttacattggcacagaatttgaaaaataaagcttccagttcagatatgagaacagcaattacagaaaaattggaaagggtcaagaaccagtgggatggcacccagcatggcgttgagctaagacagcagcagcttgaggacatgattattgacagtcttcagtgggatgaccatagggaggagactgaagaactgatgagaaaatatgaggctcgactctatattcttcagcaagcccgacgggatccactcaccaaacaaatttctgataaccaaatactgcttcaagaactgggtcctggagatggtatcgtcatggcgttcgataacgtcctgcagaaactcctggaggaatatgggagtgatgacacaaggaatgtgaaagaaaccacagagtacttaaaaacatcatggatcaatctcaaacaaagtattgctgacagacagaacgccttggaggctgagtggaggacggtgcaggcctctcgcagagatctggaaaacttcctgaagtggatccaagaagcagagaccacagtgaatgtgcttgtggatgcctctcatcgggagaatgctcttcaggatagtatcttggccagggaactcaaacagcagatgcaggacatccaggcagaaattgatgcccacaatgacatatttaaaagcattgacggaaacaggcagaagatggtaaaagctttgggaaattctgaagaggctactatgcttcaacatcgactggatgatatgaaccaaagatggaatgacttaaaagcaaaatctgctagcatcagggcccatttggaggccagcgctgagaagtggaacaggttgctgatgtccttagaagaactgatcaaatggctgaatatgaaagatgaagagcttaagaaacaaatgcctattggaggagatgttccagccttacagctccagtatgaccattgtaaggccctgagacgggagttaaaggagaaagaatattctgtcctgaatgctgtcgaccaggcccgagttttcttggctgatcagccaattgaggcccctgaagagccaagaagaaacctacaatcaaaaacagaattaactcctgaggagagagcccaaaagattgccaaagccatgcgcaaacagtcttctgaagtcaaagaaaaatgggaaagtctaaatgctgtaactagcaattggcaaaagcaagtggacaaggcattggagaaactcagagacctgcagggagctatggatgacctggacgctgacatgaaggaggcagagtccgtgcggaatggctggaagcccgtgggagacttactcattgactcgctgcaggatcacattgaaaaaatcatggcatttagagaagaaattgcaccaatcaactttaaagttaaaacggtgaatgatttatccagtcagctgtctccacttgacctgcatccctctctaaagatgtctcgccagctagatgaccttaatatgcgatggaaacttttacaggtttctgtggatgatcgccttaaacagcttcaggaagcccacagagattttggaccatcctctcagcattttctctctacgtcagtccagctgccgtggcaaagatccatttcacataataaagtgccctattacatcaaccatcaaacacagaccacctgttgggaccatcctaaaatgaccgaactctttcaatcccttgctgacctgaataatgtacgtttttctgcctaccgtacagcaatcaaaatccgaagactacaaaaagcactatgtttggatctcttagagttgagtacaacaaatgaaattttcaaacagcacaagttgaaccaaaatgaccagctcctcagtgttccagatgtcatcaactgtctgacaacaacttatgatggacttgagcaaatgcataaggacctggtcaacgttccactctgtgttgatatgtgtctcaattggttgctcaatgtctatgacacgggtcgaactggaaaaattagagtgcagagtctgaagattggattaatgtctctctccaaaggtctcttggaagaaaaatacagatatctctttaaggaagttgcggggccgacagaaatgtgtgaccagaggcagctgggcctgttacttcatgatgccatccagatcccccggcagctaggtgaagtagcagcttttggaggcagtaatattgagcctagtgttcgcagctgcttccaacagaataacaataaaccagaaataagtgtgaaagagtttatagattggatgcatttggaaccacagtccatggtttggctcccagttttacatcgagtggcagcagcggagactgcaaaacatcaggccaaatgcaacatctgtaaagaatgtccaattgtcgggttcaggtatagaagccttaagcattttaactatgatgtctgccagagttgtttcttttcgggtcgaacagcaaaaggtcacaaattacattacccaatggtggaatattgtatacctacaacatctggggaagatgtacgagacttcacaaaggtacttaagaacaagttcaggtcgaagaagtactttgccaaacaccctcgacttggttacctgcctgtccagacagttcttgaaggtgacaacttagagactcctatcacactcatcagtatgtggccagagcactatgacccctcacaatctcctcaactgtttcatgatgacacccattcaagaatagaacaatatgccacacgactggcccagatggaaaggactaatgggtcttttctcactgatagcagctccaccacaggaagtgtggaagacgagcacgccctcatccagcagtattgccaaacactcggaggagagtccccagtgagccagccgcagagcccagctcagatcctgaagtcagtagagagggaagaacgtggagaactggagaggatcattgctgacctggaggaagaacaaagaaatctacaggtggagtatgagcagctgaaggaccagcacctccgaagggggctccctgtcggttcaccgccagagtcgattatatctccccatcacacgtctgaggattcagaacttatagcagaagcaaaactcctcaggcagcacaaaggtcggctggaggctaggatgcagattttagaagatcacaataaacagctggagtctcagctccaccgcctccgacagctgctggagcagcctgaatctgattcccgaatcaatggtgtttccccatgggcttctcctcagcattctgcactgagctactcgcttgatccagatgcctccggcccacagttccaccaggcagcgggagaggacctgctggccccaccgcacgacaccagcacggatctcacggaggtcatggagcagattcacagcacgtttccatcttgctgcccaaatgttcccagcaggccacaggcaatgtga

SEQ ID NO: 2045 - protein, 3433 aa, Homo sapiens
  ref <308>: DATABASE ACCESSION NUMBER: Refseq / NP_009055
  ref <309>: DATABASE ENTRY DATE: 2000-11-02
MAKYGEHEASPDNGQNEFSDIIKSRSDEHNDVQKKTFTKWINARFSKSGKPPINDMFTDLKDGRKLLDLLEGLTGTSLPKERGSTRVHALNNVNRVLQVLHQNNVELVNIGGTDIVDGNHKLTLGLLWSIILHWQVKDVMKDVMSDLQQTNSEKILLSWVRQTTRPYSQVNVLNFTTSWTDGLAFNAVLHRHKPDLFSWDKVVKMSPIERLEHAFSKAQTYLGIEKLLDPEDVAVRLPDKKSIIMYLTSLFEVLPQQVTIDAIREVETLPRKYKKECEEEAINIQSTAPEEEHESPRAETPSTVTEVDMDLDSYQIALEEVLTWLLSAEDTFQEQDDISDDVEEVKDQFATHEAFMMELTAHQSSVGSVLQAGNQLITQGTLSDEEEFEIQEQMTLLNARWEALRVESMDRQSRLHDVLMELQKKQLQQLSAWLTLTEERIQKMETCPLDDDVKSLQKLLEEHKSLQSDLEAEQVKVNSLTHMVVIVDENSGESATAILEDQLQKLGERWTAVCRWTEERWNRLQEINILWQELLEEQCLLKAWLTEKEEALNKVQTSNFKDQKELSVSVRRLAILKEDMEMKRQTLDQLSEIGQDVGQLLDNSKASKKINSDSEELTQRWDSLVQRLEDSSNQVTQAVAKLGMSQIPQKDLLETVRVREQAITKKSKQELPPPPPPKKRQIHVDIEAKKKFDAISAELLNWILKWKTAIQTTEIKEYMKMQDTSEMKKKLKALEKEQRERIPRADELNQTGQILVEQMGKEGLPTEEIKNVLEKVSSEWKNVSQHLEDLERKIQLQEDINAYFKQLDELEKVIKTKEEWVKHTSISESSRQSLPSLKDSCQRELTNLLGLHPKIEMARASCSALMSQPSAPDFVQRGFDSFLGRYQAVQEAVEDRQQHLENELKGQPGHAYLETLKTLKDVLNDSENKAQVSLNVLNDLAKVEKALQEKKTLDEILENQKPALHKLAEETKALEKNVHPDVEKLYKQEFDDVQGKWNKLKVLVSKDLHLLEEIALTLRAFEADSTVIEKWMDGVKDFLMKQQAAQGDDAGLQRQLDQCSAFVNEIETIESSLKNMKEIETNLRSGPVAGIKTWVQTRLGDYQTQLEKLSKEIATQKSRLSESQEKAANLKKDLAEMQEWMTQAEEEYLERDFEYKSPEELESAVEEMKRAKEDVLQKEVRVKILKDNIKLLAAKVPSGGQELTSELNVVLENYQLLCNRIRGKCHTLEEVWSCWIELLHYLDLETTWLNTLEERMKSTEVLPEKTDAVNEALESLESVLRHPADNRTQIRELGQTLIDGGILDDIISEKLEAFNSRYEDLSHLAESKQISLEKQLQVLRETDQMLQVLQESLGELDKQLTTYLTDRIDAFQVPQEAQKIQAEISAHELTLEELRRNMRSQPLTSPESRTARGGSQMDVLQRKLREVSTKFQLFQKPANFEQRMLDCKRVLDGVKAELHVLDVKDVDPDVIQTHLDKCMKLYKTLSEVKLEVETVIKTGRHIVQKQQTDNPKGMDEQLTSLKVLYNDLGAQVTEGKQDLERASQLARKMKKEAASLSEWLSATETELVQKSTSEGLLGDLDTEISWAKNVLKDLEKRKADLNTITESSAALQNLIEGSEPILEERLCVLNAGWSRVRTWTEDWCNTLMNHQNQLEIFDGNVAHISTWLYQAEALLDEIEKKPTSKQEEIVKRLVSELDDANLQVENVRDQALILMNARGSSSRELVEPKLAELNRNFEKVSQHIKSAKLLIAQEPLYQCLVTTETFETGVPFSDLEKLENDIENMLKFVEKHLESSDEDEKMDEESAQIEEVLQRGEEMLHQPMEDNKKEKIRLQLLLLHTRYNKIKAIPIQQRKMGQLASGIRSSLLPTDYLVEINKILLCMDDVELSLNVPELNTAIYEDFSFQEDSLKNIKDQLDKLGEQIAVIHEKQPDVILEASGPEAIQIRDTLTQLNAKWDRINRMYSDRKGCFDRAMEEWRQFHCDLNDLTQWITEAEELLVDTCAPGGSLDLEKARIHQQELEVGISSHQPSFAALNRTGDGIVQKLSQADGSFLKEKLAGLNQRWDAIVAEVKDRQPRLKGESKQVMKYRHQLDEIICWLTKAEHAMQKRSTTELGENLQELRDLTQEMEVHAEKLKWLNRTELEMLSDKSLSLPERDKISESLRTVNMTWNKICREVPTTLKECIQEPSSVSQTRIAAHPNVQKVVLVSSASDIPVQSHRTSEISIPADLDKTITELADWLVLIDQMLKSNIVTVGDVEEINKTVSRMKITKADLEQRHPQLDYVFTLAQNLKNKASSSDMRTAITEKLERVKNQWDGTQHGVELRQQQLEDMIIDSLQWDDHREETEELMRKYEARLYILQQARRDPLTKQISDNQILLQELGPGDGIVMAFDNVLQKLLEEYGSDDTRNVKETTEYLKTSWINLKQSIADRQNALEAEWRTVQASRRDLENFLKWIQEAETTVNVLVDASHRENALQDSILARELKQQMQDIQAEIDAHNDIFKSIDGNRQKMVKALGNSEEATMLQHRLDDMNQRWNDLKAKSASIRAHLEASAEKWNRLLMSLEELIKWLNMKDEELKKQMPIGGDVPALQLQYDHCKALRRELKEKEYSVLNAVDQARVFLADQPIEAPEEPRRNLQSKTELTPEERAQKIAKAMRKQSSEVKEKWESLNAVTSNWQKQVDKALEKLRDLQGAMDDLDADMKEAESVRNGWKPVGDLLIDSLQDHIEKIMAFREEIAPINFKVKTVNDLSSQLSPLDLHPSLKMSRQLDDLNMRWKLLQVSVDDRLKQLQEAHRDFGPSSQHFLSTSVQLPWQRSISHNKVPYYINHQTQTTCWDHPKMTELFQSLADLNNVRFSAYRTAIKIRRLQKALCLDLLELSTTNEIFKQHKLNQNDQLLSVPDVINCLTTTYDGLEQMHKDLVNVPLCVDMCLNWLLNVYDTGRTGKIRVQSLKIGLMSLSKGLLEEKYRYLFKEVAGPTEMCDQRQLGLLLHDAIQIPRQLGEVAAFGGSNIEPSVRSCFQQNNNKPEISVKEFIDWMHLEPQSMVWLPVLHRVAAAETAKHQAKCNICKECPIVGFRYRSLKHFNYDVCQSCFFSGRTAKGHKLHYPMVEYCIPTTSGEDVRDFTKVLKNKFRSKKYFAKHPRLGYLPVQTVLEGDNLETPITLISMWPEHYDPSQSPQLFHDDTHSRIEQYATRLAQMERTNGSFLTDSSSTTGSVEDEHALIQQYCQTLGGESPVSQPQSPAQILKSVEREERGELERIIADLEEEQRNLQVEYEQLKDQHLRRGLPVGSPPESIISPHHTSEDSELIAEAKLLRQHKGRLEARMQILEDHNKQLESQLHRLRQLLEQPESDSRINGVSPWASPQHSALSYSLDPDASGPQFHQAAGEDLLAPPHDTSTDLTEVMEQIHSTFPSCCPNVPSRPQAM

SEQ ID NO: 2046 - DNA, 8810 bp, Rattus norvegicus
  ref <308>: DATABASE ACCESSION NUMBER: Refseq / NM_012756
  ref <309>: DATABASE ENTRY DATE: 2002-11-05
agcttcgactcgctgttgcggcgcgatcgagacccaggcgcggctcggaacggccagccgccgtgagccccacgccacacgcgatgcgggccgttctgccgggacccgtgcctccggggccgcgcgtcgcgctcctgctgccgctcctgctgctgctgctcgtggcggccgcgggctccgcgcagggccaggccgtggacttggacgccttgtgcagttacacatgggaagctgttgattccaaaaataatgcagtttataaaatcaacccctgtggacatgtggataatcccaggtgtgggccgacaagtgctgtctgtatgtgtgacctaaagtcagaaaactgccggtcagtgggtgactcacttttgagaagttcagccaaatcactcctggaatttaacaccactacgggctgccagccttcagagcacagaatccagactagcattacatttctgtgtgggaagaccctgggaactcctgaatttgtaactgccacagactgtgtgcattacttcgaatggaggactactgcagcctgcaagaaagacatatttaaagctgataaggaggtgccatgctatgtatttgatgacaagttacagaagcatgatttgaacccactgatcaagctgaatggcggctacctggtggatgactctgacgctgacgcatctctgttcatcaatgtgtgtagagacatagactcccttcgggaccccagcacacagctgagagtctgccctgctggcactgctgcctgtctgctgaaggggaaccaggcatttgatgttggccggcccaaggaggggctgaagctattgagcaaggacaggctcgttctgacttatgttaaggaagaaggagaaaagccagacttctgtaatggtcacagccctgcagtgacagtaacatttgtgtgcccatctgagcggagagagggcaccattcctaaactcactgccaactgtcgctatgaagttgagtggatcactgagtatgccagccacagagattacttggagagtgaaacctgctccctcagcagtgagcagcatgatattgctattgaccttagtcccttggcccagcatgaagaagggtccccctatgtagctgatggaggagaatataggttttttatgaatgtctgtggggacacaaaggtctcactctgtaacaaagaggctgctgtttgtcaagagaaaaaggtggattccactcaagtcaaaatagcaggaagacaccagaaccagacactccggtactcagatggagatctcaccctaatctattctggaggtgatgagtgtagttccggcttccagcggatgagtgtcataaactttgagtgcaacaaaaccgcaggtcaagatgggagaggagagcctgtgttcacaatcgaggtggactgcacatacttcttcacgtgggacactaaatatgcctgtgtaaaagagaaggaagatctcctctgcggggccatcgacggcaagaaacgttacgacctgtctgtgctggctcgtcactcagaatcagaacagaattgggaagcagtggatggcagccaggctgagtcagaaaagaggaatttcttcatcaatgtctgtcaccgggtgctgcaggcgggaaaggccaagaactgtcctgaaggtgctgccgtgtgtgctgtggataagagtggaagtaaaaatctaggaaaatttgtctcttctcctacaaaagagaaaggacacattcagctctcttactctgatggcgatgactgtggtaatgataagaaaataacaactaacatcacatttgtgtgcaaaccaggtgatctggaaagtgctccagtgctgagagctgcagggcccgatggctgctcctatgagtttgagtggcacacagctgctgcctgtgtcctgtcgcagacggagggagaaaactgcactgtccttgatgctcaggcagggttttcttttgatttgtcactcctcacaaagaagaatggtgcatataaagttgagacagacaagtatgacttctacataaatgtttgtggccctgtatccgtgaacctgtgtcagtcaaactcaggagcctgccaggtagcaaaaagtggtaagtcttggaacttggggctgagtaatactaagcttacgtactatgatgggatgatccagctgagctacaggaatggcacgctgtataacaatgaaaagcacacaccgagatccacactgattaccttcctctgtgaccgtgatgctggagtgggcttcccagaatatcaggaagaggacaactctacctacaacttccggtggtacaccagttatgcttgcccggaagagcccctggagtgcatggtgacagacccctccatgatggagcaatatgacctctccagtctagtgaagtttgaaggtggccgtggaggaaactggtatgccatggaaaactcccgagaacatttcacacggaggaaatactacctcaacgtgtgccggcctctaaatcctgtgccaggctgtgatcgatatgcatctgcttgccagagtaaatacgaaaacaatgagggctccttggcagagactgtggccatcagtaacttgggagttgcaaagacaggccctgtggtggaggagagcggcagcctcctcttagagtatgtgaacggctctgcgtgcaccaccagtgatggccggctaaccacctacagcaccaggatccatcttgtgtgtggtcgaggaactatgaattcccatcccatattcactttcaactgggaatgtgtggtcagtttcttgtggaacacggaggctgcctgccccatccagacgatcacagattcagaccaggcttgctctataagggaccccaacagcggatttgtgtttaatctgagcccacttaactattctcaaggacacatggtcttaggcattgggaagacttttgtgttcaatatctgtggtacaatgcctgcctgtggaacggttgcagggaagccagcccttggctgtgaggcagaaactaagatcaaagacattaaggatctgaagccagaaaggccagtcgggatggagaagagcctccagttgtctgccgaggggttcctcactctgacctacaaaggctcttctccttctgacagaggcacagccttcatcatccgtttcatttgcaatggtgacatttacccagggacccccaagttcctgcatcaggacattgactctgcacgagggatccggaacaccttctttgagtttgaaactgcattggcttgtattccttctgtagtggattgtcaagtgactgacccagctgggaacgagtacgacctgagtgccctgagcatggtcaggaagccgtggactgctgtggacacgtctgtgcatgggaagaagaggcgcttctatctgagcgtgtgcaccccactgccttacattcctggctgcgatggcattgcaatggggtcctgcatggtgtcagaagacaaaagtcagaacttgggtgtggtgcagatcagtcctcaagctactggaaacggatctctcagcatcctgtatgtgaatggggataggtgtggaaaccagcgctactccaccaggatagtgttcgaatgtgcccagacgtcgggctcacctatgttccagctcctgaacaactgtgagtatgtgtttgtgtggcgaacagtggaggcctgccctgtggtcagagaggaaggagacaactgccaggtgaaagaccccagacacggcaatttgtatgacctgaagcccctggccctcaatgacaccatcatcagtgctggcgagtacacctactacttccgggtctgtggaaagctgtccttagatgtgtgctctgcccatgatgggtccaaggcagtctcatcatgccaggaaaagaaaggaccacaaggattccagaaagtggcagggctccttaatcagaagctgactttcgaaaatggactgttgaaaatgaactacagtgggggggacacctgccataaggtgtatcagcgctccacaaccatctatttctactgtgaccggacgactcagaagccagtgtttctgaaggaaactttggactgctcctatttgtttgagtggcgaacacagtatgcctgcccacctttcaatgtgacagagtgctctatccaggatgaggctggcaactccattgacctctcctcactgtcaagatacagtgacaactgggaggctgtgaccaggacaggggccactgagcattacctcatcaacgtatgcaagtctctgtctccacaggctggcacagatccatgccctccagaggcagctgtttgtctgctggatggctccaagcctgtgaacctcggcagggtgagggatggtcctcagtggacagctggtgtgactgtcctgaagtatgtggatggtgacttgtgccccgacaaaattcggaaaaggtcaaccattattcgcttcacctgcagtgacagccaagtgaactccaggcctctgttcatcagtgctgtacaggactgtgagtacacattttcctggcccacacctgctgcctgtcctgtgaagagcaacatacacgatgactgccaagtcaccaaccccagcacaggccacctgtttgacctgagctccctaagtggcaaagctggcatcacagcctcctacagcgagaaggggatggtcttcatgagcatctgtgaggagaatgtgaactgtagccctggagtaggggcctgctttggacagaccaggatcagtgtgggccaggccagcaagaggctgagctacaaggatcaggtcttgcagctggtgtatgagaatgggtccccatgcccctccaagtcaggcctgaggtacaagagtgtcatcagcttcgtgtgccggccggaggctggacccaccaacaggcccatgctcatctccttggacaagcagtcgtgtacactcttcttctcctggcacacgcccctggcctgtgagcaggcgacggaatgcaccgtgcggaatggaagctcgattattgacctgtcacctctcatccaccgcactggtggttatgaagcatacgatgagagtgaggacgacacctctgataccacccctgacttctacatcaacatctgtcagccactgaatcccatgcatggagtgccctgccctgcaggcgcctcagtatgcaaagtccccgtggacgggccccctatagatattgggagagtcacaggccctccaatattcaatcccgtggccaatgaggtctacctgaactttgagagcagcactccttgcttagcggacaaatatatgaactacacctcactaattgcgtttcactgcaggagagggatcagcatgggaactcctaagctgataaggaacaatgactgtgactttgtgtttgagtgggagactccgattgtctgtcctgacgaagtgaagacacagggctgtgctgtaacagatgagcagctgctctatagcttcaacctgacgagcctttccacaagcactttcaaagtcactcgggacgctcacacatacagtataggggtgtgcacaacggcagctgacttagaccaggaaggctgcaaggacggcggggtctgtctgctctctgggagcaaaggagcttcttttgggcgcctagcgtcgatgcagctggattacaggcaccaggatgaagcagtcatcctgagttatgtgaacggtgatccttgccctccagaaacggaagatggcgagccctgtgtcttccccttcatttacaaaggggagacctatgacgaatgtgtattagagggacgagcgaaactgtggtgtagcaaaactgcgaattacgatcgtgaccacgagtggggcttctgcagaccgagcaacagtcaccggatgtctgcgatcatatttacttgtgatgagaacgaagatattgggaggccagaagtgttcagtgaagatcgtgggtgtgaggtgacatttgagtggaaaacaaaagttgtctgccctccgaagaagatggagtgcaagtttgttcagaagcataaaacctatgacttgcgattgctctcatccctcacggggtcctgggattttgtgcatgaaggaaactcgtactttatcaatctgtgccaaagagtatataaaggtcccctggactgctctgagagagccagcatttgcaagaagagtgccactggtcaagtccaggttttggggcttgttcatactcaaaaactggaagtcatagatgaaacagtccttgtcacttactcaaaaggccattcttgtggtgggaataagactgcatcctcagtgatcgagttgacctgtgcaaagactgtgggcaggcctgcattcaagaggtttgatattgacagctgcacctactacttttactggtactcacgggctgcctgtgctgtgagacctcaggaggtgaacatggtgaatggaactcttaccaaccctgtgactggcaagagcttcagcctcggggaaatttattttaagctgttcagcgcctctggggacatgagaagcaatggggacaactatctgtatgagatccagctctcctctatctccagctcttctaaccctgcgtgctccggtgccaacatctgccaggtgaagcccaatgaccagcacttcagcaggaaagtgggcacctctgacatgaccaagtactacgtccaagacggtgatctggatgtggtgtttacctcttcctccacgtgtggcaaagataagaccaagtctgtgtcttccaccatcttcttccactgtgaccctctgctgaaggacggggtccccgagttcagccacgagactgctgactgccagtaccttttctcctggtacacttcagctgtgtgtcctctgggtgtggactttgatgatgagaatgctgtgccagagtataaagggctctcagagcggagtcaggccgttggggcagtcctcagtctcctcctggtggcactgactggctgtctgctggccttgctgcttcataagaaggagagaagggaaactgtgataaacaagctgaccaattgctgcagaaggagctcgggggtgtcctataagtactcaaaggtcagcaaggaggaggagacagatgagaatgagacagaatggctgatggaagagatccaggtgccagcccccagactaggcaaggacgggcaggagaacggccacattaccaccaagacggtgaaagcagaagctctcacttccctgcatggggatgaccaagacagtgaggatgaggtcctgaccatcccagaggtgaaagttcacacaggcagaggagccgaggtggaaagctcacagcccctgagaaatccccagcgcaaggtcctgaaggaaagggagggggagaggatggggctggtccgcggtgagaaggccagaagagggaagttcagacccggacagcgcaagccaacaacccctgccaagctggtgtccttccatgatgacagtgacgaggacctcctacacatctgactccgtggtgcctacaggagaaggtggcaccatggacagccaagcatctccaaccaaataagacttcagctcgatgatgcgtctgtcattttgcctttaacaaaactgcttcaaagggaagtttctgtaatgggggagaggatgggggaggtgggcaccactcttccatgatcgtttacagtcagtggaacaaggtgttgcttgaatcggccaaagggcgctacttggtgcccagggttttgccccaagtcctcacttacgatcatagctgctgtgtgcttccaacaggtgcccaggccacatgcatctcacaacagagggctgtgtttgaaaaaaacccttgctgctttagaccctatagggtgaccatttatatttttagcattgtaattctctccccctatttattgactttgacaattactactcaggtttgcgaaaaaggaaaaaaaaaaaaaaaccagtttcttctgccagcaagggcataaggtgaagctggcattatgctggagccttgtacgtggctcctgagctggtccttgatgcacactttagtgagctgcagtattctattcttcgctttgcgttttgtaagggcacacatacatgcacaggtccccgagtgcctcggtttgggaaggcccgcctgctccgtgccctacctcgtctctatagctgcagctctttgcacgaatccttctgggtgtcgcttttgcccgctggtgagcgccagcagctcacccagaggtgggtgtttgtgcatgcgatggagtagaggctcttggagaggagccgcacttcaggtttgggctgtaggtctcatctcttcaggttctcaatgccacctttactgtgctttttgcttttattttaagggggaaatgtttatcacccattcaacctataagaagccttaatttgcacagggtgacttacagacaccgtgaaatacggtgggccagtgttgtgtgtgggcttgtgcagggcagtgtcccgggatggaaggccaggcccggtccactggctgtggactcctttcctgatgtgttcaatgacttctcacattatagagttgtatataggtggtatttacatacccagaagcaaagtaccccgcagaatttcttggtttatgcctgattttgctagcttatttgatttcacattgagtgtatttttaaaaattgatttttttcttcattttttaatcaactttactgtaatatgaagtattcaatttcaataaaaataaattattaaaaaaaaaaaaaaaaaaaaaaaaaaaaa

SEQ ID NO: 2047 - protein, 2479 aa, Rattus norvegicus
  ref <308>: DATABASE ACCESSION NUMBER: Refseq / NP_036888
  ref <309>: DATABASE ENTRY DATE: 2002-11-05
MRAVLPGPVPPGPRVALLLPLLLLLLVAAAGSAQGQAVDLDALCSYTWEAVDSKNNAVYKINPCGHVDNPRCGPTSAVCMCDLKSENCRSVGDSLLRSSAKSLLEFNTTTGCQPSEHRIQTSITFLCGKTLGTPEFVTATDCVHYFEWRTTAACKKDIFKADKEVPCYVFDDKLQKHDLNPLIKLNGGYLVDDSDADASLFINVCRDIDSLRDPSTQLRVCPAGTAACLLKGNQAFDVGRPKEGLKLLSKDRLVLTYVKEEGEKPDFCNGHSPAVTVTFVCPSERREGTIPKLTANCRYEVEWITEYASHRDYLESETCSLSSEQHDIAIDLSPLAQHEEGSPYVADGGEYRFFMNVCGDTKVSLCNKEAAVCQEKKVDSTQVKIAGRHQNQTLRYSDGDLTLIYSGGDECSSGFQRMSVINFECNKTAGQDGRGEPVFTIEVDCTYFFTWDTKYACVKEKEDLLCGAIDGKKRYDLSVLARHSESEQNWEAVDGSQAESEKRNFFINVCHRVLQAGKAKNCPEGAAVCAVDKSGSKNLGKFVSSPTKEKGHIQLSYSDGDDCGNDKKITTNITFVCKPGDLESAPVLRAAGPDGCSYEFEWHTAAACVLSQTEGENCTVLDAQAGFSFDLSLLTKKNGAYKVETDKYDFYINVCGPVSVNLCQSNSGACQVAKSGKSWNLGLSNTKLTYYDGMIQLSYRNGTLYNNEKHTPRSTLITFLCDRDAGVGFPEYQEEDNSTYNFRWYTSYACPEEPLECMVTDPSMMEQYDLSSLVKFEGGRGGNWYAMENSREHFTRRKYYLNVCRPLNPVPGCDRYASACQSKYENNEGSLAETVAISNLGVAKTGPVVEESGSLLLEYVNGSACTTSDGRLTTYSTRIHLVCGRGTMNSHPIFTFNWECVVSFLWNTEAACPIQTITDSDQACSIRDPNSGFVFNLSPLNYSQGHMVLGIGKTFVFNICGTMPACGTVAGKPALGCEAETKIKDIKDLKPERPVGMEKSLQLSAEGFLTLTYKGSSPSDRGTAFIIRFICNGDIYPGTPKFLHQDIDSARGIRNTFFEFETALACIPSVVDCQVTDPAGNEYDLSALSMVRKPWTAVDTSVHGKKRRFYLSVCTPLPYIPGCDGIAMGSCMVSEDKSQNLGVVQISPQATGNGSLSILYVNGDRCGNQRYSTRIVFECAQTSGSPMFQLLNNCEYVFVWRTVEACPVVREEGDNCQVKDPRHGNLYDLKPLALNDTIISAGEYTYYFRVCGKLSLDVCSAHDGSKAVSSCQEKKGPQGFQKVAGLLNQKLTFENGLLKMNYSGGDTCHKVYQRSTTIYFYCDRTTQKPVFLKETLDCSYLFEWRTQYACPPFNVTECSIQDEAGNSIDLSSLSRYSDNWEAVTRTGATEHYLINVCKSLSPQAGTDPCPPEAAVCLLDGSKPVNLGRVRDGPQWTAGVTVLKYVDGDLCPDKIRKRSTIIRFTCSDSQVNSRPLFISAVQDCEYTFSWPTPAACPVKSNIHDDCQVTNPSTGHLFDLSSLSGKAGITASYSEKGMVFMSICEENVNCSPGVGACFGQTRISVGQASKRLSYKDQVLQLVYENGSPCPSKSGLRYKSVISFVCRPEAGPTNRPMLISLDKQSCTLFFSWHTPLACEQATECTVRNGSSIIDLSPLIHRTGGYEAYDESEDDTSDTTPDFYINICQPLNPMHGVPCPAGASVCKVPVDGPPIDIGRVTGPPIFNPVANEVYLNFESSTPCLADKYMNYTSLIAFHCRRGISMGTPKLIRNNDCDFVFEWETPIVCPDEVKTQGCAVTDEQLLYSFNLTSLSTSTFKVTRDAHTYSIGVCTTAADLDQEGCKDGGVCLLSGSKGASFGRLASMQLDYRHQDEAVILSYVNGDPCPPETEDGEPCVFPFIYKGETYDECVLEGRAKLWCSKTANYDRDHEWGFCRPSNSHRMSAIIFTCDENEDIGRPEVFSEDRGCEVTFEWKTKVVCPPKKMECKFVQKHKTYDLRLLSSLTGSWDFVHEGNSYFINLCQRVYKGPLDCSERASICKKSATGQVQVLGLVHTQKLEVIDETVLVTYSKGHSCGGNKTASSVIELTCAKTVGRPAFKRFDIDSCTYYFYWYSRAACAVRPQEVNMVNGTLTNPVTGKSFSLGEIYFKLFSASGDMRSNGDNYLYEIQLSSISSSSNPACSGANICQVKPNDQHFSRKVGTSDMTKYYVQDGDLDVVFTSSSTCGKDKTKSVSSTIFFHCDPLLKDGVPEFSHETADCQYLFSWYTSAVCPLGVDFDDENAVPEYKGLSERSQAVGAVLSLLLVALTGCLLALLLHKKERRETVINKLTNCCRRSSGVSYKYSKVSKEEETDENETEWLMEEIQVPAPRLGKDGQENGHITTKTVKAEALTSLHGDDQDSEDEVLTIPEVKVHTGRGAEVESSQPLRNPQRKVLKEREGERMGLVRGEKARRGKFRPGQRKPTTPAKLVSFHDDSDEDLLHI

SEQ ID NO: 2048 - DNA, 425 bp, Homo sapiens
  ref <308>: DATABASE ACCESSION NUMBER: EMBL / BI018209
  ref <309>: DATABASE ENTRY DATE: 2001-06-16
cccccaagctggttcatttttgagaaaatgtgtgccaaatactcaagtgtgaataatagattttattagttgttctcgctagtagttttggtattctatgaaaaaaacagctagttcagcttacaaatcacacaagtgcttgttttcctcaaaactactattacaatttcacatgtacaagtagtgctttacacttttatcattttatcatggagatatttaaaatacgtgtagttattggttgagatcatgcttcctcaactcttcatcaaacacatagcatggcacctccttatttgctttaaatatgtctttcttgcaggctgcagtggtcctccactcaaagtagtgcacacattctgttgcagttacaaattcaggagttcccagggttttcccacacaggaaggcaatgctgctctgga

SEQ ID NO: 2049 - DNA, 2472 bp, Rattus norvegicus
  ref <308>: DATABASE ACCESSION NUMBER: Refseq / NM_145724
  ref <309>: DATABASE ENTRY DATE: 2003-01-14
gaactaaaaagatcgtgtgcgcggatgtgctgtgtctgtagtgactttttccgggcctcttttttgggagaaggtaccagtctgcctcggtgaggcagaaaaggtccgtgatgccattgggctttgcccttctagaaaacaagctctagctggacggtccagaggctccaatggctgcgggctctggggtcgccccgccacctctcggcgttgggctttgtgcggtgaaagtggaggaggactctcccgggagtcaggagccctccggttccggagattggcagaatcccgaaacttctcgaaaacagttcagacaattgcgctaccaggaagtagccggccctgaggaggcgctgagccgactttgggagctctgtcggcggtggctgaggccggagctgcgctccaaagagcagatcatggagctactggtgctggagcagtttcttaccatcctgcctcgggagctccaggcctacgtgcgggaccactgccctgagagcggggaggaggctgcggctttggcgcggactctgcaaagagcactggacggggcctccctccagagctttgcaactttcaaggatgtggctgaatctctgacctgggaagagtgggagcagctggctgcagctcggaagggtttctgccgagagagcacaaaggaccctgggagtacagttggccctggcttggaaaccaaagctgtgaccacagacgtgattctaaagcaagaaatgtcaaaggaggcagagtcccaggcatggctacaagaagtgtcccagggaaaggtcccagtatttaccaaatgtggtgatacctgggaggactgggaggaacggcttccaaaagctgccgaattgctgccgctccagagttctcctgaagagcaaggacgcactgccatcccgcatctccttggcgtgtccaaagatgaaagcgattctaaagataatgaatttgagaacagcggcagcttggtccttggtcagcacatccagacagcagagggtctggtcaccaatggtgaatgtggggaggatcacaaacaaggcttacatgcgaaatgccacacggtgaagcctcacagctctgttgacaatgctttggggcttcttgagagccagaggcatttccaagaaggcagaccttataagtgtgataactgcgagaagagattcagacagcgctcagacctcttcaaacaccagaggactcacacaggtgagaaaccctatcagtgccaagaatgtgggaaaagcttcagtcagagtgctgccctggtgaaacaccagcggacacacacaggtgagaagccatatgcatgcccagaatgcggggaatgcttcaggcagagctcacacctcagtcggcatcagagaacccatggcagcgagaagtactgtaaatgtgaggagtgtggggagatctttcatatctccagcttatttaaacatcagagactgcataaaggggagagaccacacaagtgtgaagtctgtgagaagagctttaaacagcgctcagacctctttaagcaccagagaatccatacaggagagaagccctacatgtgctttgtctgtgagagaagattcagtcagagtgcaaccctcattaaacaccagcgaactcacactggagaaaaaccttataaatgttttcaatgtggcgaaagatttagacagagtacacaccttgtccgacaccaaagaatccatcacaattcagtctctgggcttagggtggagaagcaacatggtaacctcctgagctggtgaccctctggatgcaaagaatggaaatgccccattcgcctagcgcactgacccatcgagggagaaattgacccctccacagctgcagtttatgcgccaggtacaactagcccagtggcagaaaacactgccacagcggcggacctggaacatcgtgaccccccccccccccgggcatcggggccctggtgttagctatttatggttacaccttctactcagtggcccaggaacatttccttgatgagctggaagatgaagccaaagatgcccgagcccgagctcttgagagagagagagagcatcaggaccctaactgtacggaccatcctgaaactgctggagcccccgtacatgttgaatgatgcctggtggtctcacagcatcactggcataggaactgtggactatgattgagcccaagaagccacagactatgcatttggctactgccaaggggagattgctcacgtcacatgcagtttgtacatttactcagcccctttttatttccttgtttgagaggtatgcacgaccttgcctttccccaaactctgtggtttacctcttcacctcccaggggcccaactgttaagggggagggtgtggcctaactgcagagttggaaccaaagtgggaaagatagggtcaagtaaagagtaattaaaaaaaaaaaaaaaaaaaaaaaaaaaaa

SEQ ID NO: 2050 - protein, 536 aa, Rattus norvegicus
  ref <308>: DATABASE ACCESSION NUMBER: Refseq / NP_663776
  ref <309>: DATABASE ENTRY DATE: 2003-01-14
MAAGSGVAPPPLGVGLCAVKVEEDSPGSQEPSGSGDWQNPETSRKQFRQLRYQEVAGPEEALSRLWELCRRWLRPELRSKEQIMELLVLEQFLTILPRELQAYVRDHCPESGEEAAALARTLQRALDGASLQSFATFKDVAESLTWEEWEQLAAARKGFCRESTKDPGSTVGPGLETKAVTTDVILKQEMSKEAESQAWLQEVSQGKVPVFTKCGDTWEDWEERLPKAAELLPLQSSPEEQGRTAIPHLLGVSKDESDSKDNEFENSGSLVLGQHIQTAEGLVTNGECGEDHKQGLHAKCHTVKPHSSVDNALGLLESQRHFQEGRPYKCDNCEKRFRQRSDLFKHQRTHTGEKPYQCQECGKSFSQSAALVKHQRTHTGEKPYACPECGECFRQSSHLSRHQRTHGSEKYCKCEECGEIFHISSLFKHQRLHKGERPHKCEVCEKSFKQRSDLFKHQRIHTGEKPYMCFVCERRFSQSATLIKHQRTHTGEKPYKCFQCGERFRQSTHLVRHQRIHHNSVSGLRVEKQHGNLLSW

SEQ ID NO: 2051 - DNA, 793 bp, Homo sapiens
  ref <308>: DATABASE ACCESSION NUMBER: Refseq / NM_014019
  ref <309>: DATABASE ENTRY DATE: 2000-11-02
gggaaggaggagtggcaacatggcgtcttcgggagctggtgaccctctggattctaagcgtggagaggccccgttcgctcagcgtatcgacccgactcgggagaagctgacacccgagcaactgcattccatgcggcaggcggagcttgcccagtggcagaaggtcctaccacggcggcgaacccggaacatcgtgaccggcctaggcatcggggccctggtgttggctatttatggttacaccttctactcgatttcccaggagcgtttcctagatgagctagaagacgaggccaaagctgcccgagcccgagctctggcaagggcgtcagggtcctaatctggatgggtattgatcatgtccaacctgctggagccccttcacatggtggatgatgccccatgaccctgtagaaattgaatcctgctcacaacattgttggccttcttactaaccttggaccgtgattgagcccaagaaaccagggacttacgcatttggccaatgtcaaaagaacagaactttgcccactgcacacttgctgtgtacaatgactgagccctttcttgtagtttgtttccttgtttgagaggtgtgcatgcgaccgtggcttttcccaaagtttctgactttgtggtttacccccttcaccttccagggacgcagttgttacgaggttagacgtggcagctctgtgcagtgtttgagcctacagtgggatacatagggtcaaattgagaataataaactgagtcattctcctggaaaaaaaaaaaaaaaaaaaaaaaaaaa

SEQ ID NO: 2052 - protein, 106 aa, Homo sapiens
  ref <308>: DATABASE ACCESSION NUMBER: Refseq / NP_054738
  ref <309>: DATABASE ENTRY DATE: 2000-11-02
MASSGAGDPLDSKRGEAPFAQRIDPTREKLTPEQLHSMRQAELAQWQKVLPRRRTRNIVTGLGIGALVLAIYGYTFYSISQERFLDELEDEAKAARARALARASGS

SEQ ID NO: 2053 - DNA, 366 bp, Rattus norvegicus
  ref <308>: DATABASE ACCESSION NUMBER: Refseq / NM_021842
  ref <309>: DATABASE ENTRY DATE: 2003-01-13
atgtcccagaaacaagaagaagaaaaccctgcggaggaaaccggcgaggagaagcaggatacacaggagaaagaaggtattcttcctgagaaagctgaggaagcaaagctaaaggccaaatatccaagcctaggacaaaagcctggaggctccgacttcctcatgaagagactccagaaagggcaaaagtactttgactcaggagactacaacatggccaaagccaagatgaagaacaagcagctaccgagtgcaggagcagacaagaacctggtgactggtgatcacatccccaccccacaggatctgccccagagaaagtcctcgctcgtcaccagcaagcttgcgggtggccaagttgaatga

SEQ ID NO: 2054 - protein, 121 aa, Rattus norvegicus
  ref <308>: DATABASE ACCESSION NUMBER: Refseq / NP_068614
  ref <309>: DATABASE ENTRY DATE: 2003-01-13
MSQKQEEENPAEETGEEKQDTQEKEGILPEKAEEAKLKAKYPSLGQKPGGSDFLMKRLQKGQKYFDSGDYNMAKAKMKNKQLPSAGADKNLVTGDHIPTPQDLPQRKSSLVTSKLAGGQVE

SEQ ID NO: 2055 - DNA, 749 bp, Homo sapiens
  ref <308>: DATABASE ACCESSION NUMBER: Refseq / NM_004436
  ref <309>: DATABASE ENTRY DATE: 2002-12-23
cggtgactgagcaaccctagtgacaggagccgaagcagcagcgcaggttgtccccgtttcccctcccccttcccttctccggttgccttcccgggccccttacactccacagtcccggtcccgccatgtcccagaaacaagaagaagagaaccctgcggaggagaccggcgaggagaagcaggacacgcaggagaaagaaggtattctgcctgagagagctgaagaggcaaagctaaaggccaaatacccaagcctaggacaaaagcctggaggctccgacttcctcatgaagagactccagaaagggcaaaagtactttgactcaggagactacaacatggccaaagccaagatgaagaataagcagctgccaagtgcaggaccagacaagaacctggtgactggtgatcacatccccaccccacaggatctgccccagagaaagtcctcgctcgtcaccagcaagcttgcgggtggccaagttgaatgatgctgcccggggctctgccagatcctgagacgcttcccctccctgccccacccgggtcctgtgctggctcctgccccttcctgcttttgcagccaggggtcaggaggtggctcgggtgtgggctggagaggcagaagccctttcctgttggtgtcccagcacatggaccccttgggctgagcaccaagaccttgaaccttttttgttttaccttttttccaaataacagttgggagaaatatcaatgaaattctgccg

SEQ ID NO: 2056 - protein, 121 aa, Homo sapiens
  ref <308>: DATABASE ACCESSION NUMBER: Refseq / NP_004427
  ref <309>: DATABASE ENTRY DATE: 2002-12-23
MSQKQEEENPAEETGEEKQDTQEKEGILPERAEEAKLKAKYPSLGQKPGGSDFLMKRLQKGQKYFDSGDYNMAKAKMKNKQLPSAGPDKNLVTGDHIPTPQDLPQRKSSLVTSKLAGGQVE

SEQ ID NO: 2057 - DNA, 574 bp, Rattus norvegicus
  ref <308>: DATABASE ACCESSION NUMBER: EMBL / AI228548
  ref <309>: DATABASE ENTRY DATE: 1998-11-02
ggcacaaggggaggagggtcggcagtaaagacaggtctccccacactgctccggggcaacatttgcagcgcgcccttctgtcaagaacctgctccgacgtcaggccgaggccaaccgtgtgctgctgaaatgggctctgagctggagaccgccatggagaccctcatcaatgtgttccatgcccactcgggcaaggaaggggacaaatataagctgagcaagaaggagctgaaagacctgctacaaactgaactctccagcttcctggatgtccagaaggatgcagatgctgtggacaagatcatgaaggaactggatgagaatggagatggggaagtggacttccaggagtttgttgtgctggtggctgctctcacagtggcttgtaacaacttcttctgggagaacagttgagcacagtctcagtaggcagcgccctccctctttgctcctcatcccacctgtatctccctatgtacccatccttgcccaggctcaacatgcaccaaaggcgcaacagtagcagtccagatctgccactagttttaataaagcttctctctcacgaactgtc

SEQ ID NO: 2058 - DNA, 987 bp, Rattus norvegicus
  ref <308>: DATABASE ACCESSION NUMBER: Refseq / NM_017306
  ref <309>: DATABASE ENTRY DATE: 2003-01-14
cccaccgatatccaaaatggcgctggctgctgcgcgtcgcgttctgctgcaggccggatcccgcctcggccgcaggggggccgtggacggcgcgcgtcgcttctctaacaagcgggtgttggtggagaaggagggcgaggcaggaatcgcagtgatgaagttcaagaaccctccagtgaattccctcagcttggagtttctgacagagttcgtcatcagcctggagaagctggaaaatgacaagagcatccgaggtgtcatcctcacttcggagcgcccgggtatcttctcggctggcctggacttgatggagatgtatggccggaacccagcccactatgctgagtactggaaggctgtgcaggagctgtggctgaggctctacttgtccaacctgaccttgatatctgccatcaatggcgcctctccagctggaggctgcctcatggctctcacctgtgactacaggataatggcggacaactccaagtataccataggattgaatgagagcctgctgggcattgttgcccccttctggttaaaagacaactacgtgaacaccatcgggcaccgagcagccgagcgtgcccttcaactggggacgcttttcccaccagcagaggccctcaaggtgggtttggtggatgaggtggtacctgaggatcaggtacacagcaaggctcgctcagtgatggccaagtggttcaccattccggaccattctcggcagctgacgaagagcatgatgcggaaggccacggcggacaacctgatcaagcagcgagaggctgacatccagaacttcaccagtttcatctccagagactccatccagaagtccctgcacgtgtacttggaaaagctcaagcaaaagaagggctgacctaagggtgccacacgggtgtttagttacacgtgccttctaggacccatggtcccaaggattatcaataaggtatttttcaatttaaaaaaaaaaaaaaa

SEQ ID NO: 2059 - protein, 289 aa, Rattus norvegicus
  ref <308>: DATABASE ACCESSION NUMBER: Refseq / NP_059002
  ref <309>: DATABASE ENTRY DATE: 2003-01-14
MALAAARRVLLQAGSRLGRRGAVDGARRFSNKRVLVEKEGEAGIAVMKFKNPPVNSLSLEFLTEFVISLEKLENDKSIRGVILTSERPGIFSAGLDLMEMYGRNPAHYAEYWKAVQELWLRLYLSNLTLISAINGASPAGGCLMALTCDYRIMADNSKYTIGLNESLLGIVAPFWLKDNYVNTIGHRAAERALQLGTLFPPAEALKVGLVDEVVPEDQVHSKARSVMAKWFTIPDHSRQLTKSMMRKATADNLIKQREADIQNFTSFISRDSIQKSLHVYLEKLKQKKG

SEQ ID NO: 2060 - DNA, 2072 bp, Rattus norvegicus
  ref <308>: DATABASE ACCESSION NUMBER: EMBL / M91235
  ref <309>: DATABASE ENTRY DATE: 2000-03-04
gtctgttgtgtcttgtcctgtgaacgatcgatcaataggctcagatctggggactatctgggcgggccagagaaggagctgacgagctcggacttctcccccgcagccctagaagacgttccaagggtggttggaggagagggagatccggatccgtggcacctccgtccgttttcggagggatccgcacccttgatgactccgtctgaattttttggtttcagtttggtaccgaagctgcgcggctctgcttgttacttgtttgactgttggaattgtttgtcttctttgtgacctgactgtggttttctggacgtgttgtgtctgttagtgtctttttgacttttgtttcgtgtttgaatttggactgacgactgtgtttaaaatcttggaccgacgactgtgtttgaaatcatgaaactgtttgctttgttcgtcgaagagttttacttggtccccttaacgcttagtgagtaagaaacttaattttgtagagaccccgctctagtggcagtgtgttggttgatagccaaagttaatttttaaaacatagtgttttgggggttggggatttagctcagtgatagagctcttgcctagcaagcgcaaggccctgggttcgggccccagcctagtgaaaaaaggaaagaaaaacaaaacaaaaacatatagtgttttattctgtgcttatgctcgcagccagctgtgatgaactgggaaagatttaaattttccttgggagtaaggaatcttaaaggcggagtttcacccggtatggcacttagtcgatagctgcctaaaagatcagaaatgctgttaacaggctataaaaaaaggacaggctgtgttagaaatcgtcaaggaagaatgactaaaaaggctggagagctagtggggctataggaaaacagaacaggaaaggaatttcgctcaagtaggagagcgctcattaagagtcttaagaagcctccttatctgctgtcctatccaaggaggagtagtctccaacatcaaaattacttttctccactgatcatcattaacatggagagtgcctttggtcctatccccacagcagccagttcctgcccctatggttaaaatgcccaggttgggggacaaaaagagccccctaaaatagtttcaaagaatctacaactgtgaagaactttgtttttgccagtcaggattaatgttttcttttccatggcctatagcccactgagacagtttggtaaagggctgttactaaagtcctgaaagccccaggtgaactggttacaattcttttgtcagctgcttagtatctagcacccaggttctaaccatctctccatccttttgttattagttgttactagaagcctagtgtcatttggaggctggttctcttgagagcaaagccaccaagctgacacatggaagggaggtaggtactccttaagggaaaatctaagcccagagagacagccgggtaacagctaggctgcctctctgctcgcctttctgtttcatagacaaagcttgtgcttatatttacagtggcctttttgtccaaaaaaaggcctcctggtttagctgtgtgactaaatgctatttgtcctcttcagtgacctctctcctctagattcccttcttgttttctcagaccatcccacgtgagagtcttgttagtactgttacagatcttctttaccactgaggaaagacagatcctgctagaggccagaaagaatgttccagacatggatggaaggctcctgactgttgacttcaatgcccctgaaggtagggagtgctccaggtctcccccaggctccgagggtgggtctcctaggggctggaaaatcccccgccaatctggatctggctaagataaggaaaggatatgaagagaaagttacagaaacttgaagggtaaagctaagtcactgagagagttattgtaagttgcagagaaaataagttgatgcgtggttcagggtctgtgcagaaaagtggacagcacctaatagctgtagaagaagatgcagagagactgttttttttttttttttttttttttttttttt

SEQ ID NO: 2061 - DNA, 586 bp, Rattus norvegicus
  ref <308>: DATABASE ACCESSION NUMBER: EMBL / AA799788
  ref <309>: DATABASE ENTRY DATE: 2000-03-03
cagcttctcagaaagctattttatttggatttcacacacaccaaaagcagagaggagactgtggggctggccctctttgggctggagtctctggctcccctgggcagtcggttcccagcctcccaggcttgtcatcctctgaaggctgagtggggtgtctgccctgcaccacagctcttctccaaagccgaggaaaacccatggggaatacagggtaagaggacctaaggatcatgggatgggagcccacattgaacctcggtgaggtagtctgtcgcctgaggcccacacgggtcctgctgaggtaaaatttgtaagtttatttcagggacgtgggtcaggactcctccttggtccccaggacctgcttccggatgatgtccgtgtactcgcggtccttccccttgctctccttccattttctgtacatcaccgaggcgtccacgttggcaggcgaaaaggtgttgggctcattcagcagggagatcacactcaggaggatggtcctgacattctgcgtggggttccaccgctctgagggtagctccccactctgtgggtcatcaactgggggatggaggatgga

SEQ ID NO: 2062 - DNA, 627 bp, Rattus norvegicus
  ref <308>: DATABASE ACCESSION NUMBER: EMBL / AA892246
  ref <309>: DATABASE ENTRY DATE: 1999-01-28
agacgcaacctcaggtatctctttgtattgatagctcttcccccgggagacggagagtcgctctggtggatcggtgtacagattgtatatagcgtcatttttaccgaaacccttttggcgtgcataaggatcactgtgtacacgttggccaagtgcttctgtagataatgtctgtggagtaaatatttgacaggccagaactcgagtcttattgccttgcctttattacgtgtaaatttgaagttcgtgaccagtgatttggattttattttgtatttacagggtctgtcattaataataattatcccccccctcgtggaacactcccatttgtacctcaacagacgcaaatttccctctcgttcaccctgcgccccttttggtacacatagaagttttcctttttccatcaatggtactgtttcttagtgttttcaattggaacatatcttgtctcacagagctttaaattattcttttaagtttcttccggatgaagcgctctcatctaacctgtgttgggttgtgctgctgcgtctgtaccagatgtcctgtctgacatcttccattgaatcttgtagtacaacctgcgtatcatctttcccacctcaaagtgtctgaatgctt

SEQ ID NO: 2063 - DNA, 2505 bp, Homo sapiens
  ref <308>: DATABASE ACCESSION NUMBER: Refseq / NM_003576
  ref <309>: DATABASE ENTRY DATE: 2002-04-08
tttgggttagggagagtgctttcgtttgttttaaatgggagaaactggagcatgttgccaaggcagagagccagcagagaggggtgaatggaagaaggagcgagaagggggttactgacgaagccttatcctggaggagagaaggatggactccagagcccagctttggggactggccttgaataaaaggagggccactctacctcatcctggagggagcacgaacctaaaggcagacccagaagagctttttacaaaactagagaaaattgggaagggctcctttggagaggtgttcaaaggcattgacaatcggactcagaaagtggttgccataaagatcattgatctggaagaagctgaagatgagatagaggacattcaacaagaaatcacagtgctgagtcagtgtgacagtccatatgtaaccaaatattatggatcctatctgaaggatacaaaattatggataataatggaatatcttggtggaggctccgcactagatctattagaacctggcccattagatgaaacccagatcgctactatattaagagaaatactgaaaggactcgattatctccattcggagaagaaaatccacagagacattaaagcggccaacgtcctgctgtctgagcatggcgaggtgaagctggcggactttggcgtggctggccagctgacagacacccagatcaaaaggaacaccttcgtgggcaccccattctggatggcacccgaggtcatcaaacagtcggcctatgactcgaaggcagacatctggtccctgggcataacagctattgaacttgcaagaggggaaccacctcattccgagctgcaccccatgaaagttttattcctcattccaaagaacaacccaccgacgttggaaggaaactacagtaaacccctcaaggagtttgtggaggcctgtttgaataaggagccgagctttagacccactgctaaggagttattgaagcacaagtttatactacgcaatgcaaagaaaacttcctacttgaccgagctcatcgacaggtacaagagatggaaggccgagcagagccatgacgactcgagctccgaggattccgacgcggaaacagatggccaagcctcggggggcagtgattctggggactggatcttcacaatccgagaaaaagatcccaagaatctcgagaatggagctcttcagccatcggacttggacagaaataagatgaaagacatcccaaagaggcctttctctcagtgtttatctacaattatttctcctctgtttgcagagttgaaggagaagagccaggcgtgcggagggaacttggggtccattgaagagctgcgaggggccatctacctagcggaggaggcgtgccctggcatctccgacaccatggtggcccagctcgtgcagcggctccagagatactctctaagtggtggaggaacttcatcccactgaaattcctttggcatttggggttttgtttttccttttttccttcttcatcctcctccttttttaaaagtcaacgagagccttcgctgactccaccgaagaggtgcgccactgggagccaccccagcgccaggcgcccgtccagggacacacacagtcttcactgtgctgcagccagatgaagtctctcagatgggtggggagggtcagctccttccagcgatcattttattttattttattacttttgtttttaattttaaccatagtgcacatattccaggaaagtgtctttaaaaacaaaaacaaaccctgaaatgtatatttgggattatgataaggcaactaaagacatgaaacctcaggtatcctgctttaagttgataactccctctggagcttggagaatcgctctggtggatgggtgtacagatttgtatataatgtcatttttacggaaaccctttcggcgtgcataaggaatcactgtgtacaaactggccaagtgcttctgtagataacgtcagtggagtaaatattcgacaggccataaacttgagtctattgccttgcctttattacatgtacattttgaattctgtgaccagtgatttgggttttattttgtatttgcagggtttgtcattaataattaatgcccctctcttacagaacactcctatttgtacctcaacaaatgcaaattttccccgtttgccctacgccccttttggtacacctagaggttgatttcctttttcatcgatggtactatttcttagtgttttaaattggaacatatcttgcctcatgaagctttaaattataattttcagtttctccccatgaagcgctctcgtctgacatttgtttggaatcgtgccactgctggtctgcgccagatgtaccgtcctttccaatacgattttctgttgcaccttgtagtggattctgcatatcatctttcccacctaaaaatgtctgaatgcttacacaaataaattttataacacgcttaaaaaaaaaaaaaa

SEQ ID NO: 2064 - protein, 443 aa, Homo sapiens
  ref <308>: DATABASE ACCESSION NUMBER: Refseq / NP_003567
  ref <309>: DATABASE ENTRY DATE: 2002-04-08
MDSRAQLWGLALNKRRATLPHPGGSTNLKADPEELFTKLEKIGKGSFGEVFKGIDNRTQKVVAIKIIDLEEAEDEIEDIQQEITVLSQCDSPYVTKYYGSYLKDTKLWIIMEYLGGGSALDLLEPGPLDETQIATILREILKGLDYLHSEKKIHRDIKAANVLLSEHGEVKLADFGVAGQLTDTQIKRNTFVGTPFWMAPEVIKQSAYDSKADIWSLGITAIELARGEPPHSELHPMKVLFLIPKNNPPTLEGNYSKPLKEFVEACLNKEPSFRPTAKELLKHKFILRNAKKTSYLTELIDRYKRWKAEQSHDDSSSEDSDAETDGQASGGSDSGDWIFTIREKDPKNLENGALQPSDLDRNKMKDIPKRPFSQCLSTIISPLFAELKEKSQACGGNLGSIEELRGAIYLAEEACPGISDTMVAQLVQRLQRYSLSGGGTSSH

SEQ ID NO: 2065 - DNA, 1116 bp, Rattus norvegicus
  ref <308>: DATABASE ACCESSION NUMBER: Refseq / NM_012899
  ref <309>: DATABASE ENTRY DATE: 2001-10-27
gcctagactccgtcttagcagactgctgtgttccgccggcccccaccatgcaccaccagtccgttctgcacagtggctactttcacccactgcttcgggcctggcagaccaccccctccaccgtcagtgccaccaacctcatctatcccatctttgtcacggatgttcctgatgatgtccagcccattgccagcctcccgggagtggccaggtatggcgtaaaccagctagaggagatgctgagacctctggtggaagccggccttcgctgtgtcctgatctttggcgtccccagcagagttcccaaggatgaacagggctctgcagctgactcagaggactccccaactattgaggctgtccgtctgctgaggaagaccttccctaccctcctagtggcctgtgatgtctgcctgtgcccctacacctcccatggccactgtggcctcctgagtgaaaatggagccttcctagcagaggaaagccgacaacggttggcagaggtggcactggcctatgccaaggcaggttgtcaggttgtagctccatcagacatgatggatggacgagttgaagccatcaaggctgccctgctaaaacatggacttggcaacagggtctctgtgatgagctatagtgccaaatttgcctcctgtttctatggtcctttccgggatgcagctcagtcaagcccagctttcggagaccgacgctgttatcagctgcctcctggagcccgtggcctggccctccgagcagtggcccgggacattcaagagggagctgacatactcatggtaaagccgggattaccctacctggatatggtgcaggaggtgaaggacaagcaccccgagctccccctcgcagtataccaggtgtccggagagtttgccatgttgtggcacggagccaaggctggggcctttgatctcaggactgctgtactggagtccatgacggccttccgcagagccggtgctgacattatcatcacctactttgcaccccagctgttgaagtggctgaaggaagagtgaaggaaagtgaaggacttggtcttgacagagctccctgggccttacagaagggaaaaagtaaaggcgctgttagaac

SEQ ID NO: 2066 - protein, 330 aa, Rattus norvegicus
  ref <308>: DATABASE ACCESSION NUMBER: Refseq / NP_037031
  ref <309>: DATABASE ENTRY DATE: 2001-10-27
MHHQSVLHSGYFHPLLRAWQTTPSTVSATNLIYPIFVTDVPDDVQPIASLPGVARYGVNQLEEMLRPLVEAGLRCVLIFGVPSRVPKDEQGSAADSEDSPTIEAVRLLRKTFPTLLVACDVCLCPYTSHGHCGLLSENGAFLAEESRQRLAEVALAYAKAGCQVVAPSDMMDGRVEAIKAALLKHGLGNRVSVMSYSAKFASCFYGPFRDAAQSSPAFGDRRCYQLPPGARGLALRAVARDIQEGADILMVKPGLPYLDMVQEVKDKHPELPLAVYQVSGEFAMLWHGAKAGAFDLRTAVLESMTAFRRAGADIIITYFAPQLLKWLKEE

SEQ ID NO: 2067 - DNA, 4757 bp, Rattus norvegicus
  ref <308>: DATABASE ACCESSION NUMBER: Refseq / NM_012731
  ref <309>: DATABASE ENTRY DATE: 2003-01-14
atctgtgtgcgagtgcgtgtgcgtgcgtgtgtgtgtgtgtgtgtgtgtgtgtgtgtgtgtgtgtgagcgtgtgtgtttttggatttcatactaattttctggagtttctgcccctgctctgcgtcagccctcacgtcacttcgccagcagtagcagaggcggcggcggccgccggttagagcccagtcgctgcttcagctgctgttgctgcttctgcggcgctctgctccctgcgctggctacgggaggccgggggagccgcgccgacagtcctctgtggccagggccggcactgtcctgctaccgcagttgctccccagccctgaggtgcgcaccgatatcgatatccgtgccggtttagcggttctgcgacccaaagagtccagggagagccaccgagtggcgcctggcgtataggaccatgcagccgccttgtggcttggagcagcggcccgtgatgttccagccactgtgaaccatttggtcagcgccaacctgctcagccccagcaccgacaggctcagcctctggtacgctcctctcggcgggaggccatcagcaccaagcagcaagagggctcagggaaggcctcccccctccggcgggggacgcctggctcagcgtagggacacgcactctgactgactggcactggcagctcgggatgtcgccctggccgaggtggcatggacccgccatggcgcggctctggggcttatgcttgctggtcttgggcttctggagggcttctcttgcctgccccatgtcctgcaaatgcagcaccactaggatttggtgtaccgagccttctcctggcatcgtggcatttccgaggttggaacctaacagcattgacccagagaacatcaccgaaattctcattgcaaaccagaaaaggttagaaatcatcaatgaagatgatgtcgaagcttacgtggggctgaaaaaccttacaattgtggattccggcttaaagtttgtggcttacaaggcgtttctgaagaacggcaacctgcggcacatcaatttcactcgaaacaagctgacgagtttgtccaggagacatttccgccaccttgacttgtctgacctgatcctgacgggtaatccgttcacgtgttcctgtgacatcatgtggctcaagactctccaggagacgaaatccagccccgacactcaggatttgtattgcctcaatgagagcagcaagaatacccctctggcgaacctgcagattcccaattgtggtctgccgtctgcacgtctggccgctcctaacctcacggtggaggaagggaagtctgtgaccatttcctgcagcgtcgggggtgacccgctccccaccttgtactgggacgttgggaatttggtttccaaacacatgaatgaaacaagccacacacagggctccttaaggataacaaacatttcatcggatgacagtgggaaacaaatctcttgtgtggcagaaaacctcgtcggagaagatcaagactctgtgaacctcactgtgcattttgcaccaaccatcacatttctcgaatctccaacctcagaccaccactggtgcatcccattcactgtgagaggcaaccccaagccagcacttcagtggttctacaacggagccatactgaatgaatccaagtacatctgtaccaaaatacacgtcaccaatcacacggagtaccacggctgcctccagctggataaccccactcatatgaataatggagactacaccctaatggccaagaatgaatatgggaaggacgagagacagatttctgctcacttcatgggccggcctggagttgactatgagacaaacccaaattaccctgaagtcctctatgaagactggaccacgccaactgacatcggggatactacaaacaaaagtaatgagatcccctccacggatgttgctgaccaaaccaatcgggagcatctctcggtctatgctgtggtggtgattgcctctgtggtaggattctgcctgctggtgatgctgcttctgctcaagttggcgagacattccaagtttggcatgaaaggcccagcttccgtcatcagcaacgacgatgactctgccagccctctccaccacatctccaacgggagcaacactccgtcttcttcggagggcgggcccgatgctgtcatcattgggatgaccaagatccctgtcattgaaaacccccagtacttcggtatcaccaacagccagctcaagccggacacatttgttcagcacatcaagagacacaacatcgttctgaagagggagcttggagaaggagcctttgggaaagttttcctagcggagtgctataacctctgccccgagcaggataagatcctggtggccgtgaagacgctgaaggacgccagcgacaatgctcgcaaggactttcatcgcgaagccgagctgctgaccaacctccagcacgagcacattgtcaagttctacggtgtctgtgtggagggcgacccactcatcatggtctttgagtacatgaagcacggggacctcaacaagttccttagggcacacgggccagatgcagtgctgatggcagagggtaacccgcccaccgagctgacgcagtcgcagatgctgcacatcgctcagcaaatcgcagcaggcatggtctacctggcatcccaacacttcgtgcaccgagacctggccacccggaactgcttggtaggagagaacctgctggtgaaaattggggacttcgggatgtcccgggatgtatacagcaccgactactaccgggttggtggccacacaatgttgcccatccgatggatgcctccagagagcatcatgtacaggaaattcaccaccgagagtgacgtctggagcctgggagttgtgttgtgggagatcttcacctacggcaagcagccctggtatcagctatcaaacaacgaggtgatagaatgcatcacccagggcagagtccttcagcggcctcgcacgtgtccccaggaggtgtacgagctgatgctgggatgctggcagcgggaaccacacacaaggaagaacatcaagaacatccacacactccttcagaacttggcgaaggcgtcgcccgtctacctggacatcctaggctagactccctcttctcccagacggcccttcccaaggcacccctcagacctcttaactgccgctgatgtcaccaccttgctgtccttcgctctgacagtgttaacaagacaaggagcggctctccggggtgaggcagtgcgcacttccccatccacagacagtatcgactcgcttctggctttgtcgctttctctccctttggtttgtttctttcttttgcccattctccatttatttatttatttatttatttatttatttatttatttatttatttatctatctatctatctatttatttatttatttattggtcttcactgcttcatggtcctcggcctctctccttgaccgatctggcttctgtactcctattcactgtacatagacaaaggccttaacaaacctgatttgttatatcagcagacactccagtttgcccaccacaactaacaatgccttgttgtattcctgcctttgatgtggatgaaaaaaagggaaaaaaaataatcaaacatctgacttaaaccgtcacttccgatgtacagacacggggcgtttctatggattcacttctatctatctatttatttatttatctatttatttatttctcttctttgttgttttccggtggttttagcctgtgtatgagaagggaaagtcatgtacagtctgggaaaactttatctgtgggaaatggaaaccagaaggggaaagaagctttaccataaagcacagcaggagtgagacacagaaaagccattggatcagccagagtccgtcctgcataggaaaacccagcagccatcaggctggaggatcatgttcggcactgacccccgaggacctttctgaggaggacacagaatgttaaactctgcatcatggacacagtttccgatcacagatactggccttcaatggaaaaaaaaaaaaaaaaaacccagatagttcttgtgagacctggacagcacgtccaacatccagacattgtggtcgggcacagtgacagagttgatgcatttctcacgggttattctacagagcttttgtcaagtccaatggaaggaggtagattcttgttcagatatgatttcgggaaaaaccgagtccttgacaaagacaggagacaccctcagttgggaggcaagtttctcttaccttggactttctcacacagcaattctcacccccaccccctccactctcacctgtcttgtaactgtgcaaacaaaagtgtgcatggtctttgtcagttgatacctttgtgcacctctgtgcagaaactgctgtctgtcccggctgtggtacccgatcagtggggtagatccacgaaaggtctcattttaggccgctttgggaaggtaaccagatcggtagctggaagcactctccagtaggtggcgaagggtgagtgggtctgctgaagcctgcatatcttcacccacctcaaacccaccgggctgcacaggggacaggcacaggccacccctgagggacagggaagctctcttgggataccacctgagtttacattcagtgtgctcaggtcaagtctctcgctcggggctctgtttcggggagaatggtttcattccaacgcactcattatcaggattctgttttc

SEQ ID NO: 2068 - protein, 821 aa, Rattus norvegicus
  ref <308>: DATABASE ACCESSION NUMBER: Refseq / NP_036863
  ref <309>: DATABASE ENTRY DATE: 2003-01-14
MSPWPRWHGPAMARLWGLCLLVLGFWRASLACPMSCKCSTTRIWCTEPSPGIVAFPRLEPNSIDPENITEILIANQKRLEIINEDDVEAYVGLKNLTIVDSGLKFVAYKAFLKNGNLRHINFTRNKLTSLSRRHFRHLDLSDLILTGNPFTCSCDIMWLKTLQETKSSPDTQDLYCLNESSKNTPLANLQIPNCGLPSARLAAPNLTVEEGKSVTISCSVGGDPLPTLYWDVGNLVSKHMNETSHTQGSLRITNISSDDSGKQISCVAENLVGEDQDSVNLTVHFAPTITFLESPTSDHHWCIPFTVRGNPKPALQWFYNGAILNESKYICTKIHVTNHTEYHGCLQLDNPTHMNNGDYTLMAKNEYGKDERQISAHFMGRPGVDYETNPNYPEVLYEDWTTPTDIGDTTNKSNEIPSTDVADQTNREHLSVYAVVVIASVVGFCLLVMLLLLKLARHSKFGMKGPASVISNDDDSASPLHHISNGSNTPSSSEGGPDAVIIGMTKIPVIENPQYFGITNSQLKPDTFVQHIKRHNIVLKRELGEGAFGKVFLAECYNLCPEQDKILVAVKTLKDASDNARKDFHREAELLTNLQHEHIVKFYGVCVEGDPLIMVFEYMKHGDLNKFLRAHGPDAVLMAEGNPPTELTQSQMLHIAQQIAAGMVYLASQHFVHRDLATRNCLVGENLLVKIGDFGMSRDVYSTDYYRVGGHTMLPIRWMPPESIMYRKFTTESDVWSLGVVLWEIFTYGKQPWYQLSNNEVIECITQGRVLQRPRTCPQEVYELMLGCWQREPHTRKNIKNIHTLLQNLAKASPVYLDILG

SEQ ID NO: 2069 - DNA, 694 bp, Rattus norvegicus
  ref <308>: DATABASE ACCESSION NUMBER: EMBL / AA892798
  ref <309>: DATABASE ENTRY DATE: 2000-03-03
agttcaatcaaaaaaaaaatgtatcttcacagaacatttcacaaaggggcttttccagtagtttttatgggaatagtttgacagccaggggttagcttcctttgaaagagaggcaaaccttgtgacatttcacttcaaaaataagcccggtggcattttccagtctcagtgtgaaattatccccctcgtgttgacctctcttggagtggaatgccagcaatgcaaggcagcagctaataggtaaagccggttatttatttgtcgatgttgttatttaatgagctcgcgcatgtgattttttttccaaatgttaattttttttatattttgaagctttttcatgtacctaaatatttcccaatacgatttgtggttggtctagaaatatgaaaatacatgttgtagatatgtaaaaataaatattttagactccttatatattacacggttcctcatacactttgtcattagcgtggttccctgtaaagctgaagttatgtaatactttattatttagtccatgaaatcagaaggcagcttgaccttcggtgccatcggtttcttttaataaacataaatatccactaaatgctgttgtctttgcctctgacatgcatgcttgcagatactgtaaaataaagttataagtgtgaaaaaaaaaaaaaaaataaaaaaaaagtttggctaccgcaag

SEQ ID NO: 2070 - DNA, 1742 bp, Homo sapiens
cgccaaacctctatggatatataaagggaagcttgaggaggaatttcacagttacagtgcagaagcagaagcaaaagaattaaccagctcttcagtcaagcaaatcctctactcaccatgcttcctcctgccattcatttctatctccttccccttgcatgcatcctaatgaaaagctgtttggcttttaaaaatgatgccacagaaatcctttattcacatgtggttaaacctgttccagcacaccccagcagcaacagcacgttgaatcaagccagaaatggaggcaggcatttcagtaacactggactggatcggaacactcgggttcaagtgggttgccgggaactgcgttccaccaaatacatctctgatggccagtgcaccagcatcagccctctgaaggagctggtgtgtgctggcgagtgcttgcccctgccagtgctccctaactggattggaggaggctatggaacaaagtactggagcaggaggagctcccaggagtggcggtgtgtcaatgacaaaacccgtacccagagaatccagctgcagtgccaagatggcagcacacgcacctacaaaatcacagtagtcactgcctgcaagtgcaagaggtacacccggcagcacaacgagtccagtcacaactttgagagcatgtcacctgccaagccagtccagcatcacagagagcggaaaagagccagcaaatccagcaagcacagcatgagttagaactcagactcccataactagacttactagtaaccatctgctttacagatttgattgcttggaagactcaagcctgccactgctgttttctcacttgaaagtatatgctttctgctttgatcaaacccagcaagctgtcttaagtatcaggaccttctttgggaatagtttttccttttcaagtttttcaagatgtaggtatatccatgaatgcaatttgcatttaaattccacgtatcctgtagttttaattcctcattgttcttaaaagactgttgatactataaacatcagtgaatcattatattttaaaacagaaaagggcttctcagataccctccatctactggcccatcccctctcctaaacaaaactccttcaaaacaggttaaaaaaaatatgttgtcatgaatcttcacagtaacatttcagaaaggtgcttttttggtactcttcatgggaacagtttagcagccatgagtgatcttcctttgaaagagaatgaaagaccctgtgacatttcacttcaaaaataagccctgtagctctttacggtcgcatagtatgaaattataccctgcatgctgaccctcgcttggaatggaatgccagaaatgcatggcagcagctaataagtaaagctgattaactatttatttgtcaatgttattatttaatgagctttcacatgtgatttgtttcaaaactttaattttttaatgttttgaaactttttcatggacctaaatattttcctatatgatttgtggttgattagaaatatgaaatacatgttgtagatatgtaaaatgaatattttagtctccttattacatatatgttcatggtgaactttatcaatagtatggatctttttaaatcaataagatgctttgtaaagttgaaataagtaatactttcttgtttaatctgtgcaatcagaaggtgtcttgaccttcaattcaattggtttcttttaacaaaaataaacactgctaaaagtt

SEQ ID NO: 2071 - protein, 206 aa, Homo sapiens
MLPPAIHFYLLPLACILMKSCLAFKNDATEILYSHVVKPVPAHPSSNSTLNQARNGGRHFSNTGLDRNTRVQVGCRELRSTKYISDGQCTSISPLKELVCAGECLPLPVLPNWIGGGYGTKYWSRRSSQEWRCVNDKTRTQRIQLQCQDGSTRTYKITVVTACKCKRYTRQHNESSHNFESMSPAKPVQHHRERKRASKSSKHSMS

SEQ ID NO: 2072 - DNA, 5573 bp, Rattus norvegicus
  ref <308>: DATABASE ACCESSION NUMBER: Refseq / NM_012680
  ref <309>: DATABASE ENTRY DATE: 2003-03-07
cgcgggagcagttctctaccaccgccctgcccaccatggccaaaccaactagcaaagattcaggtttgaaggagaagttcaagatactattaggactgggaacgtcaaggccaaatcctaggtgtgcagaaggcaaacagacggagtttatcatcacagcggaaatcttgagagaactgagtggtgaatgcggcctcaacaatcgaatccggatgatagggcagatctgtgatgtggcaaaaactaagaaacttgaagagcatgcagtggaggcactttggaaggctgtctcagacttgctacagccagagcggccaccggaggcccgacatgcagttctggccttgttgaaggccattgtgcagggacagggtgatcgtttgggggttctccgagccctcttcttcaaagtgatcaaggactatccttccaacgaagacctccatgaaaggctagaggtttttaaggccctcacagacaatggaaggcatattacctacttggaagaagaactggcagagtttgtcctgcagtggatggatgttggcttgtcctcagaattccttctggtactcgtgaacctggtcaagttcaacagctgctaccttgacgaatacattgcgccaatggttcacatgatttgtctgttatgtatccggacagtgtcctctgtggacatcgaggtgtccttgcaagtgctggatgctgtggtctgctacaactgcctgcctgctgagagcctgcctctgttcattatcaccctgtgccgcaccgtcaacgtcaaggagctgtgtgagccgtgctggaagctgatgcgaaaccttctaggtacccatctaggccacagtgccatttacaacatgtgccgtatcatggagaacagatcctacatggaagacgcccccttgttgaggggagccgtgttctttgttgggatggcgctctggggagctcaccgactctattcgctcaagaactcccccacatctgtgctgccgtctttttatgaggccatgacctgtcccaatgaggtggtgtcatatgagattgttctgtccataacaagactcatcaagaagtacaggaaggagctccaggctgtgacatgggacattctgctggacattattgaacgactgctccagcaactccagaacctggacagcccggaactcaggaccattgtccatgacctgctgaccactgtggaggagctgtgtgaccagaacgagttccacggatcgcaagaaagatactatgaactggtggagagctatgcagaccagaggcctgaatcctctctcttaaacctgataacctacagagcccagtctatccacccagccaaggatggctggatccagaacctgcagttgttgatggagaggttcttcaggaacgagtgccgcagtgccgtgcgcatcaaggtgctggacgtgctgtccttcgtgctcctcatcaacaggcagttctacgaggaggagctgattaactcggtggtcatctcacagctctcccacatccccgaggataaagaccatcaggttcgaaagctggctacccagctgctggtggacctggcagagggctgccacacccaccacttcaacagtctgttggacatcattgaaaaggtgatggctcgctccctttctccacccctggagctggaggaaagggatctggctgtgtactcggcctccctggaggatgtgaagacggcagtcctcgggctcctggtcatccttcagaccaagctgtataccttgcccgccagccatgccacacgagtgtatgagacactcattagccacatccagctccattacaagcatggctactccttgcccattgctagcagcatccggctgcaggcctttgacttcctgctgctactgcgggctgactcgctgcatcgactgggcctgcccaacaaggatggggtcgtgcgattcagcccttactgcctctgtgactgcgcggaactggacagggcctcagagaagaaagccagcggacccctttcaccgccaactgggccccccagccctgtgccaacgggccctgctgtgaggctcggccacctgccctactccctgcttttccgtgtcctgctgcagtgtttgaagcaggagaccgactggaaggtgctgaagctggtgctcagcaaactccctgagtcgctgcgctacaaagtcctcattttcacctccccctgcagtgttgaccagctgtcttctgctctctgctccatgctttcagccccgaagacccttgagcggctccgaggcaccccagaaggcttctccagaactgacttgcacttggctgtggtccctgtactgacagcgttaatatcttaccacaactatttggataagactagacagcgtgagatggtttactgcctagaacaaggccttatctaccgctgtgccagccagtgtgtggtagccttggccatctgcagtgtggagatgcccgacatcatcatcaaggcgctccctgtcctggtggtgaagctgacacacatctctgctacagctagcatggccatccccctcctggagttcctgtctaccttggccaggctgcctcacctctacaggaacttcgccgcagagcagtatgcaagtgtgtttgccatctccttgccctacaccaacccctccaagttcaaccagtacattgtgtgtctggcccatcacgtcatagccatgtggttcattaggtgccgactgccctttcggaaggattttgtcccttatatcactaagggtctgcgttccaatgtcctcctgtcctttgatgatacccctgagaaggacagtttcagagcacggagcaccagtcttaatgagagacccaaaagtttgaggatagccagagcccccaaacaaggcctgaataactctccacctgtgaaagaattcaaagagagctgtgcagccgaggccttccggtgccgcagcatcagtgtatctgaacatgtggtccgcagcagaatacagacatctcttaccagtgccagcttggggtctgcggatgagaactctatggcccaggctgatgacaacctgaagaatctccacttggaactcacagaaacatgtctggacatgatggcccgatatgtgttctccaacttcactgcggttcccaagaggtcccctgtgggagaattcctcctggcagggggcaggaccaaaacgtggctggttggaaataagctggtcactgtgacaacgagtgtgggaactggtacgcggtcgttgctgggcctggactccggggatctgcagggtggctcagcatcaagctctgatcctggcacacatgtgaggcagacaaaggaagcaccggccaaactggagtcccaggctgggcagcaggtgtcccgtggggcccgggaccgagtccgctccatgtcagggggccacggccttcgagttggtgtcctggacacttcagctccctacaccccaggaggccctgcttctctgggagcacaggcagcaccagcagcaaggcctgagaagccctgtgcaggagcccaacttccggcagcggagaaggcgaacctggcagcctatgtgcctttgctgacccagggctgggcagagatcctggtccgcaggcccacaggaaacaccagctggctgatgagcttggagaacccgctcagccccttttcctcagacatcaacaacatgcccctgcaagagctgtctaatgcccttatggctgctgagcgcttcaaggagcaccgggacacggccctatacaagtcattgtcagtgccagcggctggcacagccaagcctcctactctcccacgttctaacacagtggcttctttctcctccctgtaccagcccagctgccaaggacagctgcacaggagcgtttcctgggcagactcggccgtggttcttgaggagggaagtccaggagaggctcatgtgccagtggagccccccgaattggaggactttgaggcagcattaggtacagacaggcactgccagcggcctgacgcctacagcaggtcttcctcagcatctagccaggaagaaaagtcccacttggaggagctggctgcagggggtatccccattgagcgggccatctcctctgagggggctcggcctacagtggacctgtccttccaaccctcacagcctttgagcaagtctagctcttctcctgagttacagaccttacaggacatccttggagacctaggggacaagactgacattggacggctgagtcctgaggctaaggtccgatcccagtcggggatcctggatggggaagcagctacctggtcagctccgggtgaagagagccgtatcacagtcccacctgaaggtcccctgccttccagttctccccgctcccctagtggcctccggccccgaggctataccatctctgattcagctccatcacgaaggggaaagagggtagaaagggacaacttcaagagcagaactgcggcctccagtgctgaaaaggtgccaggcatcaaccctagctttgtgttcctacagctctaccattcacccttttttggtgatgagtccaataagcccatcctgttgcccaacgagtcctttgaacggtcagtgcagctccttgaccagatcccatcctatgacactcacaagattgctgtcctgtatgtgggagaaggccagagcagcagtgagctggccatcctatcaaatgagcatggctcttataggtacacagagtttctgacaggcctgggtcggcttattgagctgaaggactgccaaccagacaaggtgtacttaggtggactggatgtgtgtggcgaggatggacagttcacgtactgctggcatgatgacatcatgcaagctgttttccacattgctaccctgatgcccaccaaggatgtggacaagcaccgttgtgacaagaaacggcacctgggcaatgactttgtttctatcatctacaatgattctggtgaggacttcaagctgggcaccattaagggccagttcaacttcgtccatgtgatcatcacaccgctggactataaatgcaacctgttgaccctgcagtgcaggaaagacatggagggccttgtggacaccagtgtggccaagattgtgtctgaccgcaacctgtcctttgtggcccgacagatggccctgcatgcaaatatggcctcacaggtacaccacagccgatccaaccccacggacatctatccctccaagtggatcgcaagactccgccacattaagcgtctccgtcagcggatccgtgaagaagtgcactattcaaacccaagcttgcctctgatgcaccctccagcccataccaaagtcccagctcaagcccctacggaggctacacccacctacgagacaggccagcggaaacgcctcatttcctctgtggatgacttcacagagtttgtgtgaggccaccagagccacaactggagtcccgtggccatgcacctggcccttccctgaatgacacctcctgactgtactcttacatgaaataaaactgcccgtgcccatctg

SEQ ID NO: 2073 - protein, 1809 aa, Rattus norvegicus
  ref <308>: DATABASE ACCESSION NUMBER: Refseq / NP_036812
  ref <309>: DATABASE ENTRY DATE: 2003-03-07
MAKPTSKDSGLKEKFKILLGLGTSRPNPRCAEGKQTEFIITAEILRELSGECGLNNRIRMIGQICDVAKTKKLEEHAVEALWKAVSDLLQPERPPEARHAVLALLKAIVQGQGDRLGVLRALFFKVIKDYPSNEDLHERLEVFKALTDNGRHITYLEEELAEFVLQWMDVGLSSEFLLVLVNLVKFNSCYLDEYIAPMVHMICLLCIRTVSSVDIEVSLQVLDAVVCYNCLPAESLPLFIITLCRTVNVKELCEPCWKLMRNLLGTHLGHSAIYNMCRIMENRSYMEDAPLLRGAVFFVGMALWGAHRLYSLKNSPTSVLPSFYEAMTCPNEVVSYEIVLSITRLIKKYRKELQAVTWDILLDIIERLLQQLQNLDSPELRTIVHDLLTTVEELCDQNEFHGSQERYYELVESYADQRPESSLLNLITYRAQSIHPAKDGWIQNLQLLMERFFRNECRSAVRIKVLDVLSFVLLINRQFYEEELINSVVISQLSHIPEDKDHQVRKLATQLLVDLAEGCHTHHFNSLLDIIEKVMARSLSPPLELEERDLAVYSASLEDVKTAVLGLLVILQTKLYTLPASHATRVYETLISHIQLHYKHGYSLPIASSIRLQAFDFLLLLRADSLHRLGLPNKDGVVRFSPYCLCDCAELDRASEKKASGPLSPPTGPPSPVPTGPAVRLGHLPYSLLFRVLLQCLKQETDWKVLKLVLSKLPESLRYKVLIFTSPCSVDQLSSALCSMLSAPKTLERLRGTPEGFSRTDLHLAVVPVLTALISYHNYLDKTRQREMVYCLEQGLIYRCASQCVVALAICSVEMPDIIIKALPVLVVKLTHISATASMAIPLLEFLSTLARLPHLYRNFAAEQYASVFAISLPYTNPSKFNQYIVCLAHHVIAMWFIRCRLPFRKDFVPYITKGLRSNVLLSFDDTPEKDSFRARSTSLNERPKSLRIARAPKQGLNNSPPVKEFKESCAAEAFRCRSISVSEHVVRSRIQTSLTSASLGSADENSMAQADDNLKNLHLELTETCLDMMARYVFSNFTAVPKRSPVGEFLLAGGRTKTWLVGNKLVTVTTSVGTGTRSLLGLDSGDLQGGSASSSDPGTHVRQTKEAPAKLESQAGQQVSRGARDRVRSMSGGHGLRVGVLDTSAPYTPGGPASLGAQAAPAARPEKPCAGAQLPAAEKANLAAYVPLLTQGWAEILVRRPTGNTSWLMSLENPLSPFSSDINNMPLQELSNALMAAERFKEHRDTALYKSLSVPAAGTAKPPTLPRSNTVASFSSLYQPSCQGQLHRSVSWADSAVVLEEGSPGEAHVPVEPPELEDFEAALGTDRHCQRPDAYSRSSSASSQEEKSHLEELAAGGIPIERAISSEGARPTVDLSFQPSQPLSKSSSSPELQTLQDILGDLGDKTDIGRLSPEAKVRSQSGILDGEAATWSAPGEESRITVPPEGPLPSSSPRSPSGLRPRGYTISDSAPSRRGKRVERDNFKSRTAASSAEKVPGINPSFVFLQLYHSPFFGDESNKPILLPNESFERSVQLLDQIPSYDTHKIAVLYVGEGQSSSELAILSNEHGSYRYTEFLTGLGRLIELKDCQPDKVYLGGLDVCGEDGQFTYCWHDDIMQAVFHIATLMPTKDVDKHRCDKKRHLGNDFVSIIYNDSGEDFKLGTIKGQFNFVHVIITPLDYKCNLLTLQCRKDMEGLVDTSVAKIVSDRNLSFVARQMALHANMASQVHHSRSNPTDIYPSKWIARLRHIKRLRQRIREEVHYSNPSLPLMHPPAHTKVPAQAPTEATPTYETGQRKRLISSVDDFTEFV

SEQ ID NO: 2074 - DNA, 1801 bp, Homo sapiens
  ref <308>: DATABASE ACCESSION NUMBER: EMBL / AK022401
  ref <309>: DATABASE ENTRY DATE: 2002-08-06
ttcacccaacacaggagcctcttaaaaattctgtgtgagttcgtttcagccagtcttgcatggggacattgtcttccgtttcagtcctgacgtccaccctgtgcacctgcgtgatcgccagccctgcctggtccctcctctgcgggctctccctctccactccctcctctgggagctctgtggccccaggcccaccttccttgagagacatttgtgtgcctgccagtcatacccctttcccaggaggcgcagcttaggctctgaggctgtcccttcccaccgaactcctccctgcagcctcgcagtcctgccctcctgagagctgcccactctgctcctctccccagcgtccactgtccttgaattgccctttgctgggcattgcgatcccgcattctgtctgagggagctaagggcctcctggaagttcctctgggtcctctggcttctcccatcagggctggtcttgtcctggtctctgttcctgtggaactttttacctgcttctgtgaaaactcacgctgtcctcagcacagcacgcacacacacgcatattcacgcatgcacaggcacacacgtgcacatgcccacgcgtgcacacagccacacacaccctcacgcacacacgcacagcaccatgtgggaggggttctcggctgtgacagtgaagggcagggcctcacctcggctgctccttgtgagttgtgggccccgtgtctgtgcccggccgccctgcggtgctcaccagccttctgaacgaggagctggacaggatccctggaaggggccccggggtctctgagtcgcgctcagcgggtgcttgtgctctctgcccagctgtgctgaagtcccgagggacatgtccgctgcttgcgggtcggttcctgaggaattggaagtgtcacgagatgtggccctcgttgggctggcgctcattggcctcccttgtgcctgtgcaggaggagctgattaactcagtggtcatctcgcagctctcccacatccccgaggataaagaccaccaggtccgaaagctggccacccagttgctggtggacctggcagagggctgccacacacaccacttcaacagcctgctggacatcatcgagaaggtgagagccgttgtacccggggccgggtgctagcgtgccagagctccgtgggcagcaatggcctctgggccctctgtcctcctcttcgagtgaccggatggctgtgtccgtaggtgaggctcccctccctgcagggtgggtgtcccgaggcctgtgcagggcctgccactgctggatttgtgtcctgactgaaagtcctggacatgggtgtcctgtcacactctgggacagctgggctgggcctcctggaccgacgctggagcccagacctggggctggggctttggcctgccgtcctccctgcccagccaacagctttgctctttgattttcagatgcattttggtttctgcacagtcactcgggtataaagggcatctttgcttttgagcaataaagatgaaggccgggcacagtggctcacgcctgtaatcccagcattttgggaggctgaggcaggtggattgcttgagttcaggagttcaagaccagcctggccaacatggtgaaatcctgtctctactaaaaatataaaaattagctgcacgtggtggcgggcacctgcaatcccagctgctcaggaggctgaggcaggagaatcgcttgaacctaggaggtgaaggttgcagtgagccaagattctgccactgcactccagcctggacgacagagcaagactctgtctc

SEQ ID NO: 2075 - DNA, 1337 bp, Rattus norvegicus
  ref <308>: DATABASE ACCESSION NUMBER: Refseq / NM_134351
  ref <309>: DATABASE ENTRY DATE: 2003-01-13
gcatctgcgccctccgcagtcctctgcctcgttgccgctccgtctccccagagtcgccttctctcatcgctgcagccatgaacgggcagctcaacggcttccatgaggcgttcatcgaggaggggacattccttttcacttcagagtctgtaggggaaggtcatccagataagatttgtgaccaaatcaatgatgctgtccttgatgcacaccttcagcaggaccctgatgctaaagtggcttgtgaaactgttgctaaaactggaatgatccttcttgctggggaaattacatctagagctgccattgattaccagaaagtggttcgtgaagccataaagcacattggctatgatgattcttccaaagggtttgactacaagacttgtaatgtgttggttgccttggaacaacagtcaccagatatcgcccaaggtgttcatcttgaccggaatgaggaagacattggtgcaggagatcagggtttgatgtttggttatgccactgatgaaactgaagagtgtatgcctttaactattgtcttagcacacaagctaaatgctaaactggctgagctacgccgcaatggcacattgccttggttacgcccagattctaaaactcaagtgactgtgcagtatatgcaagatcgaggtgctgtgattcccatcagagtccatacaattgttatatctgttcagcatgatgaagaagtttgtcttgatgaaatgagggatgctctgaaggagaaattgatcaaagctgttgtacctgcaaagtaccttgatgaggatacaatttaccacctacagccaagtggcagattcgttattggtgggcctcagggtgatgctggtttgactggccgaaaaatcattgtggatacttatggcggttggggagctcatggaggaggggccttttcaggaaaggattataccaaagtggaccgttcagctgcttatgctgctcgttgggtggcaaaatcccttgttaaaggaggtctgtgcaggagggttcttgttcaggtctcttatgctattggagtttctcatccattgtcgatctccattttccattatggtacttctcagaagagtgagagagagctattagaaattgtgaagaataattttgatcttcgccctggggtcattgtcagggatctggatctgaagaagccaatttatcagaggactgcagcctatggccactttggtagggacagcttcccctgggaagtgcccaaaaagcttaaatattgaaagtgttagccttttttccccagacttgttggcgtaggttacagagaagccttcaagctctgagggaaaggg

SEQ ID NO: 2076 - protein, 395 aa, Rattus norvegicus
  ref <308>: DATABASE ACCESSION NUMBER: Refseq / NP_599178
  ref <309>: DATABASE ENTRY DATE: 2003-01-13
MNGQLNGFHEAFIEEGTFLFTSESVGEGHPDKICDQINDAVLDAHLQQDPDAKVACETVAKTGMILLAGEITSRAAIDYQKVVREAIKHIGYDDSSKGFDYKTCNVLVALEQQSPDIAQGVHLDRNEEDIGAGDQGLMFGYATDETEECMPLTIVLAHKLNAKLAELRRNGTLPWLRPDSKTQVTVQYMQDRGAVIPIRVHTIVISVQHDEEVCLDEMRDALKEKLIKAVVPAKYLDEDTIYHLQPSGRFVIGGPQGDAGLTGRKIIVDTYGGWGAHGGGAFSGKDYTKVDRSAAYAARWVAKSLVKGGLCRRVLVQVSYAIGVSHPLSISIFHYGTSQKSERELLEIVKNNFDLRPGVIVRDLDLKKPIYQRTAAYGHFGRDSFPWEVPKKLKY

SEQ ID NO: 2077 - DNA, 2137 bp, Rattus norvegicus; identical to SEQ ID NO: 535
  ref <308>: DATABASE ACCESSION NUMBER: EMBL / X57986
  ref <309>: DATABASE ENTRY DATE: 1991-08-02

SEQ ID NO: 2078 - DNA, 893 bp, Rattus norvegicus
  ref <308>: DATABASE ACCESSION NUMBER: Refseq / NM_031711
  ref <309>: DATABASE ENTRY DATE: 2003-01-13
gaaacggcggccgggaggggctacgggatcatggggcttctgaccattctgaagaagatgaagcagaaagagcgagacgtgcggctgctcatgcttggcttggacaatgctggcaaaacaaccatcctcaagaagttcaatggagaagatgtggacaccatctcgccaacactgggcttcaacatcaagaccctggagcaccggggattcaagctgaacatctgggatgtgggtggccagaagtctctgcgctcctactggaggaactacttcgagagcacagatggcctcatctgggtggtggacagcgctgaccgccagcgcatgcaggactgtcagcgagagctgcagagtctactggtggaggagcgcctggctggagcgaccctcctcatctttgccaacaagcaggacctgcctggagcactgtcctgtaatgctattcaggaggccctagagctggactccatccgcagccaccactggcgcatccaaggctgcagtgccgtcacaggggaggacctgctgcctggcatcgactggctcctcgatgacatttccagtcgtgtctttactgccgactgagcttcttcagtgtcccagctcactgtctaggtccctgtcctcatccgacaccagccggagggataagcaccagctggccagactaacattcccaaccccaccgtgacctgctgctgctactgctgcccactgctgctccctcggaggagggctgtcacccatctcccaaagtggcctgcagccgccatgccaaaaggaaagactgggctgggagggactgcctgctgctgccaggatcctgggtgtcctcctcacctgtccagcagtgagaataaagtcctcctcacccaaaaaaaaaaaaaaaaaaa

SEQ ID NO: 2079 - protein, 184 aa, Rattus norvegicus
  ref <308>: DATABASE ACCESSION NUMBER: Refseq / NP_113899
  ref <309>: DATABASE ENTRY DATE: 2003-01-13
MGLLTILKKMKQKERDVRLLMLGLDNAGKTTILKKFNGEDVDTISPTLGFNIKTLEHRGFKLNIWDVGGQKSLRSYWRNYFESTDGLIWVVDSADRQRMQDCQRELQSLLVEERLAGATLLIFANKQDLPGALSCNAIQEALELDSIRSHHWRIQGCSAVTGEDLLPGIDWLLDDISSRVFTAD

SEQ ID NO: 2080 - DNA, 902 bp, Homo sapiens
  ref <308>: DATABASE ACCESSION NUMBER: Refseq / NM_001667
  ref <309>: DATABASE ENTRY DATE: 2000-10-31
ctccggggcccatggggctcctgaccattctgaagaagatgaagcagaaagagcgggagctgcgactgctcatgcttggcctggacaatgctggaaagacaaccatcctgaagaagttcaatggggaggacatcgacaccatctccccaacgctgggcttcaacatcaagaccctggagcaccgaggattcaagctgaacatctgggatgtgggtggccagaagtccctgcggtcctactggcggaactactttgagagcaccgatggcctcatctgggtagtggacagcgcagaccgccagcgcatgcaggactgccagcgggagctccagagcctgctggtggaggagcgcctggccggagcaaccctcctcatctttgctaataagcaggacctgcctggagcactgtcctctaacgccatccgcgaggccctggagctggactccatccgcagccaccactggtgcatccagggctgcagcgccgtcaccggggagaacctgctgccgggcatcgactggctcctggatgacatttccagccgcattttcacagctgactgaaccactccagatgccccccacctagcagtccaggtccctcaaccttcaccaaacactacccatggggggttgggagtcagccggccaaactaacactccccctcctccaccccagcctgctgctgctactgctgccgctgctgctctgtggccacccggctcccatggcgggaggctgtgccctggctgtctctctggctcctgacctggcctttggctaccataccaagaagagagggctgggcggggaggagctgctactgctgctaccgaggctgtgggcctcatccttcactcagttgtgaaataaaccgctccttgccccgaaaaaaaaaa

SEQ ID NO: 2081 - protein, 184 aa, Homo sapiens
  ref <308>: DATABASE ACCESSION NUMBER: Refseq / NP_001658
  ref <309>: DATABASE ENTRY DATE: 2000-10-31
MGLLTILKKMKQKERELRLLMLGLDNAGKTTILKKFNGEDIDTISPTLGFNIKTLEHRGFKLNIWDVGGQKSLRSYWRNYFESTDGLIWVVDSADRQRMQDCQRELQSLLVEERLAGATLLIFANKQDLPGALSSNAIREALELDSIRSHHWCIQGCSAVTGENLLPGIDWLLDDISSRIFTAD

SEQ ID NO: 2082 - DNA, 355 bp, Rattus norvegicus
  ref <308>: DATABASE ACCESSION NUMBER: EMBL / AA893905
  ref <309>: DATABASE ENTRY DATE: 2000-03-03
gaagcggctggtcctacggcaggacccctctgtgaagaggacgctctgtcgcgactgctcctctctcctcatccctggcctcacctgcacgcagcgccagagacgccgaaagggacaacgctggacagtacagacctgtctgacatgccagcgaagccagcggttcctcaatgaccccaagcatctcctctggggtgaccggcctgaagcccagttggaaaatcaggcggatttcaaaccgtcagagcccctgccaaacatagctgacctttctaaggagaacgtgcagactcaggctttaaacaccactgaatgaactcatccattttccagataaataaagttgagttgtttg

SEQ ID NO: 2083 - DNA, 541 bp, Homo sapiens
  ref <308>: DATABASE ACCESSION NUMBER: Refseq / NM_024839
  ref <309>: DATABASE ENTRY DATE: 2002-12-23
agcgcggcggtgatggcggggccggtgaaggaccgcgaggccttccagaggctcaacttcctgtaccaggccgcccattgtgtccttgcccaggaccccgagaaccaggcgctggcgaggttttactgctacactgagaggaccattgcgaagcggctcgtcttgcggcgggatccctcggtgaagaggactctctgccgaggctgctcttccctcctcgtcccgggcctcacctgcacccagcgccagagacgctgcaggggacagcgctggaccgtacagacctgcctaacatgccagcgcagccaacgcttcctcaatgatcccgggcatttactctggggagacaggcctgaggcccagctcgggagccaagcagattccaaaccactacaacccttgccaaacacagcccactccatttcagaccgccttcctgaggagaaaatgcagactcagggttccagtaaccagtgatggattcaccccatctcccaaataaagtttacttgttttacattcaaaaaaaaaaaaaaaaaaa

SEQ ID NO: 2084 - protein, 154 aa, Homo sapiens
  ref <308>: DATABASE ACCESSION NUMBER: Refseq / NP_079115
  ref <309>: DATABASE ENTRY DATE: 2002-12-23
MAGPVKDREAFQRLNFLYQAAHCVLAQDPENQALARFYCYTERTIAKRLVLRRDPSVKRTLCRGCSSLLVPGLTCTQRQRRCRGQRWTVQTCLTCQRSQRFLNDPGHLLWGDRPEAQLGSQADSKPLQPLPNTAHSISDRLPEEKMQTQGSSNQ

SEQ ID NO: 2085 - DNA, 1723 bp, Rattus norvegicus; identical to SEQ ID NO: 589
  ref <308>: DATABASE ACCESSION NUMBER: Refseq / NM_031063
  ref <309>: DATABASE ENTRY DATE: 2002-11-05

SEQ ID NO: 2086 - protein, 395 aa, Rattus norvegicus; identical to SEQ ID NO: 590
  ref <308>: DATABASE ACCESSION NUMBER: Refseq / NP_112325
  ref <309>: DATABASE ENTRY DATE: 2002-11-05

SEQ ID NO: 2087 - DNA, 1952 bp, Homo sapiens; identical to SEQ ID NO: 591
  ref <308>: DATABASE ACCESSION NUMBER: Refseq / NM_000431
  ref <309>: DATABASE ENTRY DATE: 2002-11-05

SEQ ID NO: 2088 - protein, 396 aa, Homo sapiens; identical to SEQ ID NO: 592
  ref <308>: DATABASE ACCESSION NUMBER: Refseq / NP_000422
  ref <309>: DATABASE ENTRY DATE: 2002-11-05

SEQ ID NO: 2089 - DNA, 1423 bp, Rattus norvegicus
  ref <308>: DATABASE ACCESSION NUMBER: Refseq / NM_031034
  ref <309>: DATABASE ENTRY DATE: 2003-01-13
aggccggggcccgcgcgccatggacgcccctcagccggcgcggcgcggccgcggcctgagggcggtcatgtccggggtggtgcggaccctcagccgctgcttgctgccggccgaggccggagcccgcgagcgcagggcgggcgcggcgcgcgacgcggaacgcgaggcccgacggcgcagccgcgacatcgacgcgctgctggcccgcgagcggcgcgcggtgcggcggctggtcaagatcttgctgctgggcgccggcgagagcggcaagtccaccttcctcaagcagatgcgcatcatccacggccgggagttcgaccagaaggcgctgctggagttccgcgacaccatcttcgacaacatccttaagggctcgagggtgcttgtagacgctcgggacaagcttggcattccctggcagcactctgagaacgagaagcacgggatgtttctgatggccttcgagaacaaggcagggctgcctgtggagcctgccaccttccagctctacgttccagccctgagcgcactctggagagactccgggatcagggaagccttcagccgcagaagcgagttccagctgggtgagtcagtgaagtacttcctggataacttagaccggattggccagctgaactacttccccagtaagcaagacatcctgttggctagaaaggccaccaagggaatcgtggagcatgacttcgtgataaagaaaatcccatttaagatggtggatgtgggcggccagaggtcgcagcgccagaagtggttccagtgcttcgacgggatcacatcgatcctgttcatggtgtcctcaagcgagtatgaccaggtcctcatggaggataggcgcaccaaccggctggtggagtccatgaacatcttcgagaccatcgtcaacaacaagctcttcttcaacgtctccatcatcctcttcctcaacaagatggacctgctggtggagaaggtgaagtcggtgagcattaagaagcacttcccagacttcaagggcgacccgcaccggctggaggacgtccagcgctacctggtccagtgctttgacaggaagcgcaggaaccgcggcaagcctctgttccaccacttcaccactgccatagacaccgagaacatccgcttcgtgtttcatgccgtgaaggacaccatcctgcaggagaacctgaaagatatcatgctgcagtgagacagcccctctgccagtcctctcgtggcctctgtgtggccacatgtctctggtgtgtctgccacctgcatggacctgcagtgggcatctcgaagccacaccatctaatacctggcactaagaatgctggactgtcagccacaccagcgagctgcgggcaagaggatgggagtgtcagtgatagctactgaatcggggactgaaactactgaatcc

SEQ ID NO: 2090 - protein, 379 aa, Rattus norvegicus
  ref <308>: DATABASE ACCESSION NUMBER: Refseq / NP_112296
  ref <309>: DATABASE ENTRY DATE: 2003-01-13
MSGVVRTLSRCLLPAEAGARERRAGAARDAEREARRRSRDIDALLARERRAVRRLVKILLLGAGESGKSTFLKQMRIIHGREFDQKALLEFRDTIFDNILKGSRVLVDARDKLGIPWQHSENEKHGMFLMAFENKAGLPVEPATFQLYVPALSALWRDSGIREAFSRRSEFQLGESVKYFLDNLDRIGQLNYFPSKQDILLARKATKGIVEHDFVIKKIPFKMVDVGGQRSQRQKWFQCFDGITSILFMVSSSEYDQVLMEDRRTNRLVESMNIFETIVNNKLFFNVSIILFLNKMDLLVEKVKSVSIKKHFPDFKGDPHRLEDVQRYLVQCFDRKRRNRGKPLFHHFTTAIDTENIRFVFHAVKDTILQENLKDIMLQ

SEQ ID NO: 2091 - DNA, 404 bp, Rattus norvegicus
  ref <308>: DATABASE ACCESSION NUMBER: EMBL / AI639350
  ref <309>: DATABASE ENTRY DATE: 2000-03-04
catcatggccactttcctcctccagacagaggtcacctagccccaggtatggctctgccaggtgacaggagccttatcatttggagccttatcaaagaaacaagtgttgctcaatgtgctggtggacacagggcttagctggagcagactgcttcccactcagaccgtcacctgggtgtcctgctaagctgacccttcctaagggctccatacttcacagctcaggcttgtcgggagctggctcttggcgctcgctgacttatgccaaagagaaagaagctaatcagggactttgtgcaatttagtagactcccagcctcctgctgaggggaggaccgtgtcagtattctagtggaaatttgtccgcttatttccaagtaaacactttttggttttgtgtttaa

SEQ ID NO: 2092 - DNA, 395 bp, Rattus norvegicus
  ref <308>: DATABASE ACCESSION NUMBER: Refseq / NM_012812
  ref <309>: DATABASE ENTRY DATE: 2003-01-14
cctcttaaggtcctcagtcggagcatggccagcgcatccaaaggagaccacggaggcgcaggagccaacacttggcgcctcctgacctttgtgctggctctccccagcgtagctctctgctcgcttaactgctggatgcacgctggccaccatgagcgcccagaattcatcccctatcaccacctccgcatccgaaccaagcccttctcctggggggatgggaaccacacgcttttccacaatccccacgtcaatcctttgcccaccggctacgagcagccttgaagactcagcagacgtactctgccacagtctcaaactgacctccataccggctctaagggcccctgaggttccagtggacagttccaagcgcaataaaggtgtgaaacttt

SEQ ID NO: 2093 - protein, 86 aa, Rattus norvegicus
  ref <308>: DATABASE ACCESSION NUMBER: Refseq / NP_036944
  ref <309>: DATABASE ENTRY DATE: 2003-01-14
MASASKGDHGGAGANTWRLLTFVLALPSVALCSLNCWMHAGHHERPEFIPYHHLRIRTKPFSWGDGNHTLFHNPHVNPLPTGYEQP

SEQ ID NO: 2094 - DNA, 871 bp, Rattus norvegicus
  ref <308>: DATABASE ACCESSION NUMBER: Refseq / NM_053788
  ref <309>: DATABASE ENTRY DATE: 2001-11-07
atgaaggaccgaacccaggagctccgcacggccaaggacagcgatgacgacgatgatgtcactgtcactgtggaccgagaccgcttcatggatgagttctttgaacaggtggaagagatccggggctttattgacaagattgctgagaacgtggaggaggtgaagaggaaacacagcgccatcctggcctccccgaaccccgatgagaagaccaaggaggaactggaggagctcatgtcggacattaagaagacagcgaacaaagttcgctccaagctaaagagcatcgagcagagcatcgagcaggaggaaggtctgaaccgctcgtcggcggacctgaggatccggaagacgcagcattccacgctgtcccgaaagtttgtggaggtcatgtccgagtacaacgccactcagtcagactaccgagaacgctgcaaagggcgcatccagaggcagctggagatcactggccggaccacgaccagtgaggagttggaagacatgctggagagtgggaatcccgccatctttgcctctgggatcatcatggactccagcatctcgaagcaggccctcagtgagatcgagaccaggcacagtgagatcatcaagttggagaacagactccgggagctacacgatatgttcatggacatggccatgctggtggagagccagggggagatgattgacaggatcgagtacaatgtggaacacgctgtggactacgtggagagggccgtgtctgacaccaagaaggccgtcaagtaccagagcaaggcacgcaggaagaagatcatgatcatcatttgctgtgtgattctgggcatcatcatcgcctgcaccatcgggggcatctttggatagatcc

SEQ ID NO: 2095 - protein, 288 aa, Rattus norvegicus
  ref <308>: DATABASE ACCESSION NUMBER: Refseq / NP_446240
  ref <309>: DATABASE ENTRY DATE: 2001-11-07
MKDRTQELRTAKDSDDDDDVTVTVDRDRFMDEFFEQVEEIRGFIDKIAENVEEVKRKHSAILASPNPDEKTKEELEELMSDIKKTANKVRSKLKSIEQSIEQEEGLNRSSADLRIRKTQHSTLSRKFVEVMSEYNATQSDYRERCKGRIQRQLEITGRTTTSEELEDMLESGNPAIFASGIIMDSSISKQALSEIETRHSEIIKLENRLRELHDMFMDMAMLVESQGEMIDRIEYNVEHAVDYVERAVSDTKKAVKYQSKARRKKIMIIICCVILGIIIACTIGGIFG

SEQ ID NO: 2096 - DNA, 2088 bp, Homo sapiens
  ref <308>: DATABASE ACCESSION NUMBER: Refseq / NM_004603
  ref <309>: DATABASE ENTRY DATE: 2002-11-05
catgaaggaccgaacccaggagctccgcacggccaaggacagcgatgatgatgatgatgtcgctgtcaccgtggaccgagaccgcttcatggatgagttctttgagcaggtggaggagattcgaggcttcattgacaagatcgcagagaacgtggaggaggtgaagcggaagcacagtgccatcctggcatcccccaaccccgatgagaagacgaaggaggagctggaagaactcatgtccgacataaagaagacagcaaacaaagttcgttccaagttaaagagcatcgagcagtccatcgagcaagaggaaggcctgaaccgctcctccgctgacctgaggatccggaagacacagcactccacgctgtccagaaagtttgtggaggtcatgtcggagtacaacgccacgcagtccgactaccgcgagcgctgcaaaggccgcatccagaggcagctggagatcaccggcaggaccacgaccagtgaggagctggaggacatgctggagagtgggaaccccgccatctttgcctctgggatcatcatggactccagcatctcgaagcaggctctgagcgagattgagacgcggcacagtgagatcatcaagctggagaacagcatccgtgagctacacgacatgttcatggacatggccatgctcgtggagagccagggagagatgattgacaggatcgagtacaatgtggaacacgcggtagactatgtggagagggccgtgtctgacaccaagaaggccgtcaagtaccagagcaaggcgcgccggaagaaaatcatgatcatcatctgctgtgtgatcctgggcatcgtcatcgcctccactgttgggggcatcttcgcctagaagccacccaaactgccactccactccaggtgggccactccaaggaggccctggctgctgccacctggctgggctgccctcccaacccccgcctctggctcagagcaccctccctcccggcccccatgctcccttctctgccatgggccctccgtccccgccccgtgtcgtgtgcatgatctctgtgagtgtgcgtctgtacgggaagaggcagagggaggcagccagcggggcgtgatgcagtgtgcacagcgaggagcagacccaggcagggccgccagggtgacacaggccacgcttccttgccttcagtaactcggtgggcccaggttctgctcttccctggggaccctaacctcgcctccagctgacctgccctgtcctctccagctgtccccacaagcagagccctgaggggtggggaccagctggccacatggtgctgcttttcaggttaggggagaggtgaccctgagggacagcccagctctgagtctcagtcgctgatcactgccagggaggctcaggctgccatggctccaggctccctcccctgcctaggggcaaagtccatcgggtcctgggcctcagcttcccttcccacattcctccggccccaggagcaaccccttgggctaggtctgaccccaggtgtccctctggaaggggctggctggtgccctatttccagccaccccagcagctagggaggcaaagcaggctgcagtcagtccctcaagccagcgttgcatgtttgggatggtggctcctgttgtcttgcgctctgggaagtcagatgtcatttcaggcctgcagtctcatcctgcccttgccatcctcccatcgatgtgccacgtgggtgtcacgtgtcccagatgcagtattcggcagccagccggggagggctacctcctcctcctcaccaccttggggcttctcatgggaaatgtgcccccgccccaggaccctctcccttgtggacaggcagggagatgcatgcgagtgcatgcagcaggggatggggccgtgtccgtgtgccccaccctccctcggctttactcctgcccagtgactgtgaccactgtccgtgttgccttcttgaacagcgattccccccaaccccttcaccaaaggtcttggtacaaccagctgcccattttgtgaaatttttatgtagaataaacatttgtatctgtaaaaaaaaaaaaaaaaaagcgttc

SEQ ID NO: 2097 - protein, 288 aa, Homo sapiens
  ref <308>: DATABASE ACCESSION NUMBER: Refseq / NP_004594
  ref <309>: DATABASE ENTRY DATE: 2002-11-05
MKDRTQELRTAKDSDDDDDVAVTVDRDRFMDEFFEQVEEIRGFIDKIAENVEEVKRKHSAILASPNPDEKTKEELEELMSDIKKTANKVRSKLKSIEQSIEQEEGLNRSSADLRIRKTQHSTLSRKFVEVMSEYNATQSDYRERCKGRIQRQLEITGRTTTSEELEDMLESGNPAIFASGIIMDSSISKQALSEIETRHSEIIKLENSIRELHDMFMDMAMLVESQGEMIDRIEYNVEHAVDYVERAVSDTKKAVKYQSKARRKKIMIIICCVILGIVIASTVGGIFA

SEQ ID NO: 2098 - DNA, 474 bp, Rattus norvegicus
  ref <308>: DATABASE ACCESSION NUMBER: EMBL / U77953
  ref <309>: DATABASE ENTRY DATE: 1998-04-27
ttggccaccgtccaccccatctcctccaccaagttccggaagccctccatggccaccctggtgatctgcctcctgtgggcgctctccttcatcagtatcacccctgtgtggctctacgccaggctcattcccttcccagggggtgctgtgggctgtggcatccgcctgccaaacccggacactgacctctactggttcactctgtaccagtttttcctggcctttgcccttccgtttgtggtcattaccgccgcatacgtgaaaatactacagcgcatgacgtcttcggtggccccagcctcccaacgcagcatccggcttcggacaaagagggtgacccgcacggccattgccatctgtctggtcttctttgtgtgctgggcaccctactatgtgctgcagctgacccaactgtccatcagccgcccgaccctcacgtttgtctacttgtacaacgcggccatcagcttgggc

SEQ ID NO: 2099 - DNA, 4563 bp, Rattus norvegicus
  ref <308>: DATABASE ACCESSION NUMBER: Refseq / NM_031511
  ref <309>: DATABASE ENTRY DATE: 2003-01-13
gcctgctctccggcggagctgcgtgaggccaggccggcccccggcccccccttccggccgcccccgcctcctggcccacgcccgcccgcgctcggcccgccagcgcctccatccgggctggcggccccgcgtcgacgccgtccgccacctcgctgctaactcccgtgcagggcgccgtcggcggggcctcgctccgtcgggcctgcggatctccccaccgcctcctcctctatctacctcaacaccccattcctgcttcgccagaggaggcggtccccaccgcaggcagtccggcttgcaggtcgccggcgttgtcatcccccgcgctccccctcccagccctccccggcgcgcagcccggcagctcctctcttttcgctgcagtcccgagcagccgcggcgccgccacgcctgacccccccacaagaagccggggcttacgacggctgagggctccgtcggccctaaccgagctgggtgcccgtggccggggtgacgcctccattcctcccccctcaacaccgtcctcgatccttcgaagttgcatcctttcctctgcttagagtgcgccccccctcgcgcactcgcttacccgccacctttcctaggctcccctcctgccccctccccgttcctcctcgcctcagactccctccccctcacgtccgccctctgccttcgcctacccaagtggattaattatacgctttctgtttctctccgtgctgtcctctcccgctgtgagcctacccgcctctcgctgtcctctctccctctctccctctctgtgtcccccccctttcacgttcactctgtctctctcactatctctgccccccaactatccttgatacaacagctgacctcatttcccgatacctttcccccccccgaaaatacagtatctggcccgccccagccctaagataccctaaagaagcagaagagacgcccccctccccatcaaaaaaagccatctccccgttctgtcccgtcgcacattcggcctctgcgacttggacagagcggcgctggcagaggagtgcccggcagaagggccttcgcccgctgttcggtttgcatacccgcagcagggagatgggcggcagcgtcgccggcttccaggtaccaatggggatcccagtggggaagtcgatgttggtgcttctcatctctttggccttcgccttgtgctgcatcgctgcttaccgccccagcgagactctgtgcggaggggagcttgttgacacgcttcagtttgtctgttcggaccgcggcttctacttcagcaggccttcaagccgtgccaaccgtcgcagccgtggcatcgtggaagagtgctgcttccgcagctgcgacttggccctcctggagacatactgtgccacccccgccaagtccgagagggacgtgtctacctctcaggccgtacttccggacgacttccccagataccccgtgggcaagttcttcaaattcgacacctggagacagtccgcgggacgcctgcgcagaggcctgcctgccctcctgcgtgcccgccggggtcgcatgcttgccaaagagctcgaagcgttcagagaggccaagcgccaccgtcccctgatcgtgttaccacccaaagaccccgcccacgggggagcctcttcggagatgtccagcaaccatcagtgaaccaaattatgtggtaattctgcaatgtagtaccatcagtctgtgacctcctcttgagcagggacagctccatcatgtcccacactaaggtctctctgctccacttcccttcccaggtttctccccacccacccccatgccccgcctccccacatcaggctgctccccttgccccacaccatcgggcaaggggatcccagcaactcttcaaaaccaaatttgattggctctaaacaacccaattggcaccctccaaattatatatgaacattaaaaaaaaactttaaagcatatagtccctttacaacaaattggcttaagaaactccataactgataatctaaaaattaaataaccaaagaaattaattggctaaaaacatactaaaaattaattggcttaaaaacaattggcaaaaatcaaataatttggcccgcccccccccccttcatcttctttccatttagatctttagtcaaattggctcagacttggatctcagaacccaagaagaaaggaaggggacccaaaattttgcaggtagcatgtcattgcttcagtgctctctccttgtcactagtcacttttagcataatctggctgtgaacaacaatagccgcccaaactctttcttcactggtcattccatcacaaatgtcacccatgtcaccaaggggctgggtgaaggaacccaaggagaggaacagaacatgaaaactgaaaatagaacctaattggcacaagcccccagtcccaaaaatctcacttttcatacctactctaaaaagcacatgattatacccacacgtacatgcacacacacatgcacacaggcatgcatacacacacacacacacacacacacactattagatgagaacattgaaatggctgagcaacttcgattggaaccacattgcccaatccaaggcccatcttaaattccctgagcagtttgcatggtttgagctcctctctgaatccatctagtttctgctgccagtgtagagtcagtttggccagataaggagatggcactgccaagtgatacatgctacccgagtagcctgacccctaggtgtgctcctgggaggaaagatctgggggacaacccctaccccaagcacacctatgggccatctctgtcaatctcctggggagcccccactttttaggggctccccaggagactcacactgatgtggggagtgtgggaagtctggcggttggaggggtgggtggggggcagtgggggctgggtggggggaaactatgggtaggaagtggtcccagagaggtcttaggtggaacagtcaggaggaggcacaggtcaacttgcagaattactgaagaatcaggaccccaaattttctgtcaattgatctattcccctctttttatgtctggggcaggttttttccttttttttttttaatccctccttagcttttaatgcgctcataatcccattccctatgtaacgggggcagcgatcaagtaatgaatgcatcaagccatcaataccagcgagagccagtaacaccggctagagccatcaacaccggcttccaccatgtcctgctcccaaccatttatcaaccttttttttttttttatctgtctctatcgcttggcctgagttgggagtggagtctctgtggggtgctggccacgcacccacagagaaataaaaggaattgagaaggccgctacctggcctgacttctggggacagtggctggtccccagaagttctgaggagtggagggggcgtggggcagtgtcccctcaggtgttaggaaggtgctcggaggccacaaagatggggccccagctggccctgccagttgggggggaaggggatgtagatgtaagactagagaggttccatcaggcgggagcaagtggctgccttctgagcacttgggggaggtcctccccgtgcccctcagtgtcatcttgcccactcctcagcaccccatcttaccctcaggaggtctggagctctacagacctcctgggggcaaggtggggtgaggcctggagctggggaagcgaggaggctttaaagccttcagagccaggagaactgtgtacatggggttgtctgggccctggggcccgagggtctggtgagccgtagcagccactccacggtgcctaggactgcggcggggaacagggcggctggaggtttacctcacccccacttctgcttccagtgcagtccccctgcccaacagtcctactagtaatctagaggcctgaggcttctgggcccaggtgacaggactggcaccaccctgggggcggtgtgtgtcagccagccatggcacagagggttctcagcaagtgcctaaagaatgggccatttggaacattggacagaaactcaaagagtaaattgttataattggagaatatgaattggcctggtacccaaaatatctcgaggcaccctaaattacctgcccatttgactggacatccacccagtgttaatatgcctcgtgggatgggtgttttcaggggcatttgctgaccatcctctgtgtccccagatttgcagttctccccatcataggtcaccctgatgcaggcacctccctggcctcccatgcctagtgtggccctccatcttgttttgtctcttccctactgtcttcggtgggatcccctcttgggtcccccaatttgtcatcctgtgaagacttcccacgcgtcgaatgccatatgtcacctgtgccactgcccatgtcatccagcagtggccccgggtatttgccccaactcagtccttttaacatgcattttctggcaaaatccaaagcttgggttttgtttttaacctgttaacgcttgcaaacctaataaagcattcaaaatact

SEQ ID NO: 2100 - protein, 180 aa, Rattus norvegicus
  ref <308>: DATABASE ACCESSION NUMBER: Refseq / NP_113699
  ref <309>: DATABASE ENTRY DATE: 2003-01-13
MGIPVGKSMLVLLISLAFALCCIAAYRPSETLCGGELVDTLQFVCSDRGFYFSRPSSRANRRSRGIVEECCFRSCDLALLETYCATPAKSERDVSTSQAVLPDDFPRYPVGKFFKFDTWRQSAGRLRRGLPALLRARRGRMLAKELEAFREAKRHRPLIVLPPKDPAHGGASSEMSSNHQ

SEQ ID NO: 2101 - DNA, 1815 bp, Rattus norvegicus
  ref <308>: DATABASE ACCESSION NUMBER: EMBL / U92081
  ref <309>: DATABASE ENTRY DATE: 1998-01-07
agttgccaagtttgctgtgcttgctccctccgctcgccttgaaagcccgggcactctctgtcgctgggactcttgctcaccgcttgccagcctcctcagagctcttctcggctgggcctgtggcttcgaagtttttttgttttttcatcttttcacaacccacaaaaaccactagctgctgaggctccaacgagatcaagatgtggaccgcgccagtgttgctctgggttttggggagcgtttggttctgggactcagcgcagggaggggccatcggtgcgctagaagatgatcttgtgaccccgggtccaggagatgacatggtgaacccaggtctagaagacagaatagaaaccacggacactacaggagaactggataagtcaactgccaaggcgcctctggtaccaacacagcctcccattgaggaactgccgacctcaggaacctccgaccacgatcacaaagaacatgagagtacgaccactgtcaaagcggtgaccagccactccacggacaagaaaacaactcaccccaatagagataacgcaggcggtgaaacgcagaccacagataagaaagatggcttggctgtagtgacctggtcggcaatcataattggcgtcttgttagccattggcttcattggagggatcatcattgtggttatgaggaagatttctggaaggttctcgccctaaagagccaaacagaactggttgttctcccaacacatctgaaaataagagagcttccaccttgccctgttccccatccctcttcctgtggaggaagatgacccatggaatgcccacccacccctctcacagccatggtgacccctccacttgccagcagtaccaaaggaaagatacgggacaagccactggcccctcgaaccatctgcctttggaaatcaaattttttaatataaatgttatgattgaggaccacatgcatagaaaaatggtgcaaaaaccgagacagtatcatcagctttatcaactgtaaccatgggttggttcttccgggccagtcccagtctgttaagaggcaaaagaatttggaaatgttacctcacagaggcacgggtctttttgcagttgccaacctgcaaatgcagttgatgcatacatattccagcctagtggggtctgaatcagtgcattgaaagtataaacccaaaatcaggcgtgataggcagcccctcagggagcttcattataccttttcagaagcatccactgccttcagttcccggaagataccttgctttttacaagcctccaaaccctctctaagcctcagatgactcaatgacccagaggtctgtctactccactccccctggtgatggaaagcccaagttgaggaaccatgtcctcacctccctaggcctcaagccttcagatcaaccgcttctttctggacgatggagacctcatcccagatgctcagaaagtttgttggatgtcacaaaatgccagagcctcagccgctgtcgaaccaagaacgaaactcagtccttaagtggaagtgactcctgtgcctgctttagcgtaggaaatgagaccaaccagtttctagcacctgccttctgcttcccaggaaagacggagaaaaaaataatcttgtatgttcttaactgcttctaggtggtggatggaaaggtttgatgttaatttccggtcttcgtgacataccacatcttcccatgaggactcggtgttgctggcacaagagctgtagtgtcttggttacctgtgttggtactcaatacagtgtagacatcttttcaaataaaatatgattgtg

SEQ ID NO: 2102 - DNA, 557 bp, Rattus norvegicus
  ref <308>: DATABASE ACCESSION NUMBER: EMBL / AA800315
  ref <309>: DATABASE ENTRY DATE: 2000-03-03
catctgccgatattcaggtttattcataatttagctgttgtgaaaatgcagctgaaatacggatatcccaagaaactttgcaggttggtggcttcaggtgacttttgtacacagctttgtgctgacacctaaaggaaatctatacaggattctaggattccagattactcctagttagcaggctggagcaccttatttatttgtagcagaaaaatctaatagaatcattatatccagagtagacagcaaaataaaacagttttttttttttcactatctagggtagacatcagaatgaagagatgttttctgagagtaatttaaccttgaagaaatccttgtagaaatccggggtgttttctctcatccatggggttatttttctgaaggagctttacagcctttgagtgacttctgggtcacaagttggtcctggcacacctggaatgtcttgcattatcgagcacatctccccagccagctctttcggagggtggcccaagtcctgtaactgctgcataagatcgagtaccgcctcaaagcgagccctgtgagta

SEQ ID NO: 2103 - DNA, 3662 bp, Homo sapiens
  ref <308>: DATABASE ACCESSION NUMBER: Refseq / NM_002857
  ref <309>: DATABASE ENTRY DATE: 2000-10-31
aggtagcaagatggccgccgctgaggaaggctgtagtgtcggggccgaagcggacagggaattggaggagcttctggaaagtgctcttgatgatttcgataaagccaaaccctccccagcacccccttctaccaccacggcccctgatgcttcggggccccagaagagatcgccaggagacactgccaaagatgccctcttcgcttcccaagagaagtttttccaggaactattcgacagtgaactggcttcccaagccactgcggagttcgagaaggcaatgaaggagttggctgaggaagaaccccacctggtggagcagttccaaaagctctcagaggctgcagggagagtgggcagtgatatgacctcccaacaagaattcacttcttgcctaaaggaaacactaagtggattagccaaaaatgccactgaccttcagaactccagcatgtcggaagaagagctgaccaaggccatggaggggctaggcatggacgaaggggatggggaagggaacatcctccccatcatgcagagtattatgcagaacctactctccaaggatgtgctgtacccatcactgaaggagatcacagaaaagtatccagaatggttgcagagtcatcgggaatctctacctccagagcagtttgaaaaatatcaggagcagcacagcgtcatgtgcaaaatatgtgagcagtttgaggcagagacccccacagacagtgaaaccactcaaaaggctcgttttgagatggtgctggatcttatgcagcagctacaagatttaggccatcctccaaaagagctggctggagagatgcctcctggcctcaactttgacctggatgccctcaatctttcgggcccaccaggtgccagtggtgaacagtgtctgatcatgtgaaacacaacacgttttcctctctgagtcccagctatggggaacatctggagtcagcagaaccattgggacctgaggcaggagtgtcacctgcgggagaagtctgcccgctgccctctgtcatcccattcaagattgtgccataccagctgaggtttttcctctgtctctctaggaatagggtctgtttcacaggccatttctgtgaaccctactccattgtggtttctgccactatcaaagttccagctacctgcaaggtgaaggaaggcatcccttttggggcatgcactttctttcctttctcaaaataatgttatatgtggccacactgatgttcacctttacgtccagggtctttgtgccttgtctctactccctctcttggatctggggaggaggggcagagacctgggactctgtatttctatagttctcctggcagagcctttgagaatggggagaaacagcctgggctggggctacaggtctgtcactatgctctcttgccttcagacagaccattctgaattctctaaagggaaagggcttttgcatctaatcacaatagagttgaaagagaggccttaggattctcctctctctaggtgctgagccctcacctccctgttccaggctgagaactcaaatggttaccctgcttcttcctacaatgctgtgtgatatgggtgaacccagcccctgaccttcctctatcccctgcccatcctcccttttacctcctctcttttttaaacacctgtttatcccaacctttttgagctcaagctgtgataaagaagggcccatcctatttcccctcatctagtccatttacgattctcactgactccccgtcttcctggcagacacaaataaacccagtgtcaggtctaggaaattaatggctattcttccccagatacattctggcttatttgagatacatgattctcttagaatcctgtcccttggttcaggaaagtagcttggaaaaggagtaggggtatagcttgggtcccttttcctgcaaggccccatggggcagaatataataaatattctgagtgaggagtgtggtctttttctgatcttcctcagcttccgtaagttgcagagtgaggtatattaggagactagttctacacaatattgtaatgctgggttccatcaacacccaccttccacaactcagtctgcacctcagttggcaaaggagactggatggccatctttcctcatgttcccttgagtatttcaatgtagaaagcccttcaagtggtattatattttaaccttttacattattgttattaatgttagtaatatattgttatgttttctaaattatttttctttaagctgacgtggctttttttctgtggctcccagtgggtctacggaccttggctgacatatgttggtaggtactctggtcagctcagctggctgtcctggttcactcagaagataagtctctccaaagcaaattcacatgcattatgagtcgctttgagcttctgacatgtcacttgccccgaggttaaaacttttcaccccttgaagaccttacatgttttatggtattggtgaggaaggaaatgttctcaaggtctcaggctatttgggaaattccaactcctataccttaccagagcatggaagagcccagatctgaatgtaaaacgtctctgttctgccagagatggaaaaaatacaggtatacttgtgatatagtcatggggcttcagtgtcactattttctccttaaagctccagccaaaaactggacaaggatagagaggaggagggaagaacaaaagagcccttctctatgaaccttgtgccttctgtcctaccagttttcttttacagattctcacttctgctagcctagccagggcttactccaggaatctaaatagatgccctagtccactttatctttgttcccaaggcactcatttttattttgattttgattgaatgtgagcaggttgacctcaggtcacactttgttccaaaaacttttggaattattccaggacttgtggtggagttatggtactctagggcagtctttctcaaactatgtatggtaaaggaccaggttttttgttttccagtccttcacttatcaatatgcattcctattgccgatgacaggtatggagttcacactgtgtgctgccgacccggcaagtttgacagcacccaaactggccagactgttctgtaggttaagtccattgatcatgtacttggatatcacagcaacattgaaatgctaaaaagtttttaaacactctcaatttctaattcaccatgtcacagactggtgaaaaaaaaaaaaaggtgttcactgaccagcacaagtctgcagatcatctttgagtagcactgttttggggccctcggtctctctgaagaccctagcagaactgatacctacctgtatctcttgttctctcctatttgagtttcacttccagagaacttgttcttcagcaagaatgtgtcactagtaaggacatctctagcatttctctagccttccttttctgctgctcaaaaataatcgttacaaagcttaggtttaagctgtatatgaaatatttatgcgactctcaaactttaaaggagttgctcctttgttccaaaattaaatgtgttagataaatttgtgattgtatgggtggcttcatgaattaagaattgaattaatacagactttttgataataaaaaaaaaaaaa

SEQ ID NO: 2104 - protein, 299 aa, Homo sapiens
  ref <308>: DATABASE ACCESSION NUMBER: Refseq / NP_002848
  ref <309>: DATABASE ENTRY DATE: 2000-10-31
MAAAEEGCSVGAEADRELEELLESALDDFDKAKPSPAPPSTTTAPDASGPQKRSPGDTAKDALFASQEKFFQELFDSELASQATAEFEKAMKELAEEEPHLVEQFQKLSEAAGRVGSDMTSQQEFTSCLKETLSGLAKNATDLQNSSMSEEELTKAMEGLGMDEGDGEGNILPIMQSIMQNLLSKDVLYPSLKEITEKYPEWLQSHRESLPPEQFEKYQEQHSVMCKICEQFEAETPTDSETTQKARFEMVLDLMQQLQDLGHPPKELAGEMPPGLNFDLDALNLSGPPGASGEQCLIM

SEQ ID NO: 2105 - DNA, 330 bp, Rattus norvegicus
  ref <308>: DATABASE ACCESSION NUMBER: Refseq / NM_053345
  ref <309>: DATABASE ENTRY DATE: 2003-01-13
atggcatatcagttatacagaaatacaactttggggaacagtcttcaagagagccttgatgagctcatacagtctcaacagatcaccccccagcttgcccttcaagttctacttcagtttgataaagctataaattcagcattggctcagagagtcaggaacagagtcaatttcaggggctctctaaatacatacagattctgcgataatgtttggacttttgtattgaatgatgttgaattcagagaggtgacagaacttattaaagtggataaagtgaaaattgtagcctgtgatggtaaaaataccggttccaataccacggaatga

SEQ ID NO: 2106 - protein, 109 aa, Rattus norvegicus
  ref <308>: DATABASE ACCESSION NUMBER: Refseq / NP_445797
  ref <309>: DATABASE ENTRY DATE: 2003-01-13
MAYQLYRNTTLGNSLQESLDELIQSQQITPQLALQVLLQFDKAINSALAQRVRNRVNFRGSLNTYRFCDNVWTFVLNDVEFREVTELIKVDKVKIVACDGKNTGSNTTE

SEQ ID NO: 2107 - DNA, 736 bp, Homo sapiens
  ref <308>: DATABASE ACCESSION NUMBER: Refseq / NM_004492
  ref <309>: DATABASE ENTRY DATE: 2002-02-09
cgagctggagaggtggtcggagaagtaggaacctcctgccgggctcgtggcggcttctgtccgctccgcggagggaagcgccttccccacaggacatcaatgcaagcttgaataagaaaaacaaattcttcctcctaagccatggcatatcagttatacagaaatactactttgggaaacagtcttcaggagagcctagatgagctcatacagtctcaacagatcaccccccaacttgcccttcaagttctacttcagtttgataaggctataaatgcagcactggctcagagggtcaggaacagagtcaatttcaggggctctctaaatacgtacagattctgcgataatgtgtggacttttgtactgaatgatgttgaattcagagaggtgacagaacttattaaagtggataaagtgaaaattgtagcctgtgatggtaaaaatactggctccaatactacagaatgaatagaaaaaatatgacttttttacaccatcttctgttattcattgcttttgaagagaagcatagaagagactttttatttattctagaattgcagaaatgactacactgtgctataccagagaattccagtagaaagaaacttgtaactctgtagcctcttacatcacctttattatacagcatgaaaaaccataacttttttttaaggacaaaagttgttgccttcctaagaaccttctttaataaactcattttaaaactctg

SEQ ID NO: 2108 - protein, 109 aa, Homo sapiens
  ref <308>: DATABASE ACCESSION NUMBER: Refseq / NP_004483
  ref <309>: DATABASE ENTRY DATE: 2002-02-09
MAYQLYRNTTLGNSLQESLDELIQSQQITPQLALQVLLQFDKAINAALAQRVRNRVNFRGSLNTYRFCDNVWTFVLNDVEFREVTELIKVDKVKIVACDGKNTGSNTTE

SEQ ID NO: 2109 - DNA, 2287 bp, Rattus norvegicus
  ref <308>: DATABASE ACCESSION NUMBER: Refseq / NM_017223
  ref <309>: DATABASE ENTRY DATE: 2003-01-14
tctaaaggaaagatcacagctttcccagactgggagaaaaaatatggaatgtggtgtaccactgactgaccataaccaaatgaactgtagtgacagtagtctaaaagccagcggttaacaatttcttcagacttcaacactatccatcgctttccagagcagactcgctgtttacaagaactcttggcctcccgaagatagcaacctcaaattttgtttatttaaaatatttctgcaaaaggaaaagtaccccagagcccattttccaaaatggccatggatgggtatctgtggatggtcattttgggtttcattattgctttcatcctggcattttcagttggtgccaatgatgttgccaactcctttggaaccgcggtgggctctggcgtggtgaccctgagacaggcatgcattctggcttcgatatttgaaaccaccggctctgtgcttttgggagcgaaagtgggagagactatccggaagggcatcattgacgtgaacctctacaatgagactgtggaaacgctcatggctggggaagtgagtgcaatggtcggctcagcggtctggcagttgatcgcgtccttcctgagactcccaatctcagggacacactgcatcgtgggctctaccattggcttctcgctcgtggccatcggcccaaagggagtgcagtggatggaactcgtcaagatcgttgcctcctggttcatatccccacttctgtctggcttcatgtctggtgtgctgttcatcctgatcagaatgttcatcctaaccaaggaggaccctgttccaaacggtctccaggcacttcctctgttttatgctgccactatagcaataaacgtcttctccatcatgtacacaggagcaccagtgctgggcctgtcgctccccatctgggcaatagcgctcatctccttcggcgttgccctgctgttcgccttcttcgtgtggctgttcgtgtgtccgtggatgaagaggaaaatagcgggcaggttagagaaggagagtgctctgtcccgcgcgtctgacgaaagcctcaggaaggtacaggaagctgagtcccctgtctttaaggagcttcctggtgccaaagccagtgatgacagcgctgtccccctcaccagtctggctggggaggctgcgggggcctcagaaggcacgtcagcagggaaccacccccgggcttcctacggccgagcactttccatgactcacggctctgcaaagtcacccatctccaatggaacctttggcttcgaaggccacatgaggaatgacggtcacgtttatcatactgtacacaaagactcgggactctacaaagacttgctgcacaaaatccatgtagacaagggccccgaggagaaaccagctcaggaaaacaactacaggctgctccggaggaacaacagctacacgtgctacacggcagccatctgcggcatgccggtgcacgccaccttcagggcctcggacacctcctccgcccccgaggatagcgagaagctggtgggtgacaccgtgtcctattccaagaagaggctccgctacgacagctactccagctactgcaacgcggtggccgaggcggagatcgaggccgaagagggcggcgtggaaatgaggctggcctctgagctgaccgatcctgaccagcctcacgaggatcctgcggaagacgagaaggaggagaaggactccgcagaggtccacctgctcttccacttcctgcaagtcctcactgcctgctttgggtcctttgctcacggtggcaacgatgtgagcaatgctatcggtccccttgtggccctgtggctgatatataaacaaggcggagttacacaagaagctgctactccagtctggctgctgttttatgggggcgttggcatctgcacaggtctctgggtttggggcagaagagtgatccagaccatggggaaggatctcacacccatcacaccgtccagtggcttcactattgagctggcctctgccttcaccgtggtgatcgcctccaacattgggcttcccgtcagcaccacacactgcaaggtgggctcagtggtagccgtgggctggatccgctcccggaaggctgtggactggcgcctcttccggaacatatttattgcctggttcgtgaccgtgccggtggccggacttttcagtgctgctatcatggctctcctcatgtatatatgtggttttgtttcttccagtcggtaaatggccacagggatgctctgacacggatatggtcctcacctttaga

SEQ ID NO: 2110 - protein, 656 aa, Rattus norvegicus
  ref <308>: DATABASE ACCESSION NUMBER: Refseq / NP_058919
  ref <309>: DATABASE ENTRY DATE: 2003-01-14
MAMDGYLWMVILGFIIAFILAFSVGANDVANSFGTAVGSGVVTLRQACILASIFETTGSVLLGAKVGETIRKGIIDVNLYNETVETLMAGEVSAMVGSAVWQLIASFLRLPISGTHCIVGSTIGFSLVAIGPKGVQWMELVKIVASWFISPLLSGFMSGVLFILIRMFILTKEDPVPNGLQALPLFYAATIAINVFSIMYTGAPVLGLSLPIWAIALISFGVALLFAFFVWLFVCPWMKRKIAGRLEKESALSRASDESLRKVQEAESPVFKELPGAKASDDSAVPLTSLAGEAAGASEGTSAGNHPRASYGRALSMTHGSAKSPISNGTFGFEGHMRNDGHVYHTVHKDSGLYKDLLHKIHVDKGPEEKPAQENNYRLLRRNNSYTCYTAAICGMPVHATFRASDTSSAPEDSEKLVGDTVSYSKKRLRYDSYSSYCNAVAEAEIEAEEGGVEMRLASELTDPDQPHEDPAEDEKEEKDSAEVHLLFHFLQVLTACFGSFAHGGNDVSNAIGPLVALWLIYKQGGVTQEAATPVWLLFYGGVGICTGLWVWGRRVIQTMGKDLTPITPSSGFTIELASAFTVVIASNIGLPVSTTHCKVGSVVAVGWIRSRKAVDWRLFRNIFIAWFVTVPVAGLFSAAIMALLMYICGFVSSSR

SEQ ID NO: 2111 - DNA, 519 bp, Rattus norvegicus
  ref <308>: DATABASE ACCESSION NUMBER: EMBL / AA874928
  ref <309>: DATABASE ENTRY DATE: 2000-03-03
tttgatactggtcagaaattttatactgccaacaaataagtctcagcttctcagatttgcagcggaataaattcattattataatagaaattgctatacagaaggatttaattgagcattattattctcaaataattgttaacttcagtagcagcctcggttccctgcctggccctgtgcacatggtatttcagggtagatgtagcttccatatgtgagactcagtgaacacacgtgggccagaaccttccccactgatgtgctttcctattgcctggctgtgggttttgtaaagataaattatgttgttgtgttttaatgtgtgtttcatgtacatgttcagaaaccaagccttgctctgctagcttcagaatcctaactctgcactcattctttctaatgtttcaaactatactcagtactgtttgacatttgacttttttacatgtttaaaatgttgctggatttttgtgctgtttgccaaacttatataataaaggaagtgttgtgtttatttcc

SEQ ID NO: 2112 - DNA, 2567 bp, Homo sapiens
  ref <308>: DATABASE ACCESSION NUMBER: Refseq / NM_003794
  ref <309>: DATABASE ENTRY DATE: 2003-01-15
ggcggcgcaggcgcactgggttcgccgcgccgaactgcagccatggagcaggcacctccggaccccgagcggcagctccagccggcgcccttggagccgctgggctccccagacgctgggctgggggctgcggtcggcaaggaagcggagggggccggagaagagagctctggggtcgacacgatgacacacaataatttttggttgaagaagatagaaatcagtgtttcagaagcagaaaaacgaactggaagaaatgccatgaacatgcaagaaacatatactgcttacctcattgaaacaaggtcagttgaacataccgatggtcagagtgtcctaacagactcactatggcggcgatatagtgaatttgagttgttgagaagctaccttttagtttactatccacatattgttgtgccacctctgccagaaaaacgggcagaatttgtttggcataaactctctgctgacaacatggatccagattttgtggagaggcgacggattggtttagaaaactttctcttgaggattgcttcacatcccatcctttgtagagacaaaatcttctatctgtttttaacacaggaaggtaactggaaggagactgtgaatgaaactgggtttcagctgaaggcagactccaggttaaaagcgcttaatgcaacattcagagtgaaaaacccagacaagagatttactgaccttaagcactatagtgatgaactgcagtctgtcatctcacatcttcttcgagtcagagctagagtagcagatcgactctatggtgtatataaagtacatgggaattatggtcgagttttcagtgaatggagtgccatagaaaaagaaatgggtgatggactgcagagtgctggtcatcatatggatgtgtatgcatcttctattgatgatattttggaagatgaagaacattatgcagatcagttaaaagagtatcttttttatgcagaagcattgcgggctgtgtgcaggaaacatgaacttatgcagtatgacttggagatggctgctcaggacttagcatccaagaagcagcagtgtgaggaactggtaactgggactgtgagaacattctctttgaagggaatgactaccaagctctttggtcaagaaactccagagcagagagaagccagaataaaggtgctagaagaacaaataaatgaaggagaacaacagctaaagtctaaaaatctggaaggcagagaatttgtgaaaaacgcatgggctgatattgaacgcttcaaagaacaaaagaaccgagacttaaaggaggccctcataagctatgcagtcatgcagatcagtatgtgcaaaaagggaattcaagtttggaccaatgctaaggaatgctttagcaagatgtaatcctgtgaattgaatttctcttcaatcaaagtgccccaaaacagaagcacaagtaaataaaagaaatttaagtcactacctagtatacataaacatatacaataagttaaataaattcagctttctttaacttaattgtggtcgtgttaatgtagcacaaaaaatatattttaatgaagattaaatattataatttgaggttttggggactggtgctgattccaaaaagttaatttaataatatataccaacagattgtttgtcacgcttctgaaccaatgactgaatgtcaagatgttcgttaatttctagatgtttgtttcaagaccagctgtttcagatctattaatgtagggaatttttccctaagattgaattcctatatttacttggtaagatccactaatctgttatagggagttgttttctcttgccttatagttgagctatttggtttgacaaagctcagcagaaacttgatgtgaaaaatctacgattttcttctacattcattgatgccccttgtaatgtttgcatacactagaaaatgccttcaatttgtgttttaccagaattttgatactggtcagaaattttatactgccaacaaagaagactcaacttctcagatctataatgggatacattgtcatcctctagcaactcctatatagaaagttttaactgaatatgttacatataagaattaaattcttctcaaataattcttaacctcagtaatgagcctaaatttactctgcttggctctctacacatggcatttcagggtataagatgtagcatttcaatgtgtaagatatatgtactaaacatatgtgttgctatcttcatcattaacatccttcttttctattgcttggctgtaatttttgtaaagataaattatattgtttttttgtatgtgtgtttgtagtatatgttcagaaggcaagcatcttcattttgctagctttgcagaatcttaaaatgtgtactcgttatttctaatgatgtaaaaaaaaatccctagtcctgtttagcatttgacttttttatatgttttaaatgttgctggatttttgtgctgtttgccaaacttatacaataaataaatgaaatattgtgctgaaaaaaaaaaaaaaaaaaaaaaaaaaaaaaaaaaaaaaaaaaaa

SEQ ID NO: 2113 - protein, 450 aa, Homo sapiens
  ref <308>: DATABASE ACCESSION NUMBER: Refseq / NP_003785
  ref <309>: DATABASE ENTRY DATE: 2003-01-15
MEQAPPDPERQLQPAPLEPLGSPDAGLGAAVGKEAEGAGEESSGVDTMTHNNFWLKKIEISVSEAEKRTGRNAMNMQETYTAYLIETRSVEHTDGQSVLTDSLWRRYSEFELLRSYLLVYYPHIVVPPLPEKRAEFVWHKLSADNMDPDFVERRRIGLENFLLRIASHPILCRDKIFYLFLTQEGNWKETVNETGFQLKADSRLKALNATFRVKNPDKRFTDLKHYSDELQSVISHLLRVRARVADRLYGVYKVHGNYGRVFSEWSAIEKEMGDGLQSAGHHMDVYASSIDDILEDEEHYADQLKEYLFYAEALRAVCRKHELMQYDLEMAAQDLASKKQQCEELVTGTVRTFSLKGMTTKLFGQETPEQREARIKVLEEQINEGEQQLKSKNLEGREFVKNAWADIERFKEQKNRDLKEALISYAVMQISMCKKGIQVWTNAKECFSKM

SEQ ID NO: 2114 - DNA, 2120 bp, Rattus norvegicus
  ref <308>: DATABASE ACCESSION NUMBER: Refseq / NM_031801
  ref <309>: DATABASE ENTRY DATE: 2003-01-13
cggcccaactcgggcggcctcttcgggccccgcttcgggctcggtgcctggcgcttcgggcggtcccggacagcgccttcgggcggactcggtggagtccgtatggaggactcggactcggcggcaaaacagctgggcctggccgaggcggcagcggtggcggccgctgccgctgtggcggcggccgccgcggccgcagcggaaagcgaggcggaggagccggtgttaagcagagacgaggactcggaggaggacgcagactccgaggcggagcgcgagacgcggcgggtcacggctgtggcggtgatggcggccgaatctgggcacatggatatgggtaccgaggctctgcccagccctgatgaggccgccgccgccgccgcctttgcagaagtgaccacagtgactgtggccaacgtggggtcctctgcagataacgtcttcacaacatcagtggcaaatgcagcctcgatatcaggacatgtcctgtctggtaggacagccctgcagatcggggacagcctgaacactgagaaagccacactaatagttgtacacacagatgggagcattgtggaaaccaccgggctgaagggcccagcagcacctctcaccccaggtcctcagtctcctcctaccccactggcacctggccaggagaaaggtggtaccaagtacaactgggacccttcggtgtatgacagcgagctgcctgtgcgctgtcggaacatcagtggcacgctctacaagagtcggctcggctcaggtggccgggggcggtgtatcaagcagggagaaaactggtacagcccaaccgagtttgaagccatggcaggaagagccagcagcaaggactggaagagaagcatccgctatgcgggcagacccctgcagtgcctcatccaggatggtattttgaaccctcacgctgcctcctgcacctgtgctgcctgttgcgatgacatgactctaagtggccctgtcaggctcttcgtcccctataaaaggcgcaagaaagagaatgagctgcccacgactccagttaagaaggattcccccaagaacatcacgctgctccctgccacggcggccaccaccttcactgtgacaccctcaggacagatcactacctctggagcactaacctttgaccgagcatccactgtggaggccactgctgtcatctctgagagcccagcccaaggggatgtctttgcaggagccacagtgcaagaggcaggcgtgcagcccccctgcagggttggccaccctgaaccccactaccctggctatcaggacagctgccagatcgccccgtttccagaagctgcattgccaacatcacatcccaaaattgtcctgacatcgctgcccgccttggccgtgccgccctccacccccaccaaagctgtctctcccaccgtggtcagtgggctggagatgtcagagcatcggagctggctgtacctggaagagatggtcaactccctcctcaacacagcccagcagctgaagacgttgtttgaacaagccaagcaggcgagctcttgcagggaagctgctgtgacccaggcgagaatgcaggttgatgcagagaggaaggagcagtcatgtgtcaactgcggccgggaggccatgagtgagtgcaccggctgccacaaggttaactactgctctacgttctgccagcgcaaggactggaaagaccatcagcatgtatgtggccagtcagcatctgtcactgtccaggctgatgacgtccatgttgaagaaagtgtgatagaaaaagttgctgtctgagccaggcttctccctgagctctactgagaagccatcacaggcttaggctctgactttgggggctgctgagaagagggccctgggaaacttgccggacaagttattaacagactgtgcccttggaaacaaactcctgccagagaccaaggaacgctggcagcttgcaggatggggcactctgccacagcccagggtcctctgcctatcacggtgctctttcttccctggatcatgagtgtcctactaccctcggggtgccctagccacgtgtacatacctgttttatctgttaataaagatgtaaataaagctcccacccc

SEQ ID NO: 2115 - protein, 565 aa, Rattus norvegicus
  ref <308>: DATABASE ACCESSION NUMBER: Refseq / NP_113989
  ref <309>: DATABASE ENTRY DATE: 2003-01-13
MEDSDSAAKQLGLAEAAAVAAAAAVAAAAAAAAESEAEEPVLSRDEDSEEDADSEAERETRRVTAVAVMAAESGHMDMGTEALPSPDEAAAAAAFAEVTTVTVANVGSSADNVFTTSVANAASISGHVLSGRTALQIGDSLNTEKATLIVVHTDGSIVETTGLKGPAAPLTPGPQSPPTPLAPGQEKGGTKYNWDPSVYDSELPVRCRNISGTLYKSRLGSGGRGRCIKQGENWYSPTEFEAMAGRASSKDWKRSIRYAGRPLQCLIQDGILNPHAASCTCAACCDDMTLSGPVRLFVPYKRRKKENELPTTPVKKDSPKNITLLPATAATTFTVTPSGQITTSGALTFDRASTVEATAVISESPAQGDVFAGATVQEAGVQPPCRVGHPEPHYPGYQDSCQIAPFPEAALPTSHPKIVLTSLPALAVPPSTPTKAVSPTVVSGLEMSEHRSWLYLEEMVNSLLNTAQQLKTLFEQAKQASSCREAAVTQARMQVDAERKEQSCVNCGREAMSECTGCHKVNYCSTFCQRKDWKDHQHVCGQSASVTVQADDVHVEESVIEKVAV

SEQ ID NO: 2116 - DNA, 3216 bp, Rattus norvegicus
  ref <308>: DATABASE ACCESSION NUMBER: Refseq / NM_057104
  ref <309>: DATABASE ENTRY DATE: 2003-01-13
ggtacccaacagcctgaactcagagccccgagagcagagcattcagggcaagcagaaacaccctgcagaggctttccaagaatccctcggcatggcaagacaaggctgtctcgggtcattccaggtaatatccttgttcacttttgccatcagtgtcaatatctgcttaggattcacagcaagtcgaattaagagggcagaatgggatgaaggacctcccacagtgctgtctgactctccatggaccaacacctctggatcctgcaaaggtagatgctttgagcttcaagaggttggccctccagactgtcggtgtgacaacctgtgtaagagctacagcagctgctgccacgatttcgatgagctctgtttgaaaacagtccgaggctgggagtgcaccaaagacagaagtggggaagtacgaaacgaggaaaatgcctgtcactgcccagaagactgcttgtccaggggagactgctgtaccaactaccaagtggtctgcaaaggagaatcacactgggtagatgatgctgcgagaaatcaaagttccgaatgcctgcaggtttgtccgcctccgttaatcatcttctctgtggatggtttccgtgcatcatacatgaagaaaggcagcaaggttatgcccaacattgagaaactgcggtcctgtggcacccatgtcccctacacgaggcctgtgtaccccacaaaaaccttccctaatctatatacgctggccactggtttatatccggaatcccatggaattgtcggtaattcaatgtatgatcctgtctttgatgcttcgttccatctacgagggcgagagaagtttaatcataggtggtggggaggccaaccgctatggattacagccaccaagcaaggggtgagagctggaacattcttttggtctgtgagcatccctcatgaacggaggatcctaaccattcttcagtggctttctctgccagacaacgagaggccttcagtttatgccttctactcagagcagcctgatttttctggacacaagtacggcccttttggccctgagatgacaaatcctctgagggagattgacaagaccgtggggcagttaatggatggactgaaacaactcaggctgcatcgctgtgtgaacgttatctttgttggagaccatggaatggaagatgtgacatgtgacagaactgagttcttgagcaactatctgactaatgtggatgacattactttagtgcctggaactctgggaagaattcgagccaaatctatcaataattctaaatatgaccctaaaaccattattgctaacctcacgtgcaaaaaaccggatcagcactttaagccttacatgaaacagcaccttcccaaacggttgcactatgccaacaacagaagaattgaagacatccatttattggtcgatcgaagatggcatgttgcaaggaaacctttggacgtttataagaaaccatcaggaaaatgttttttccagggtgaccacggctttgataacaaggtcaatagcatgcagactgttttcgtaggttatggcccaacttttaagtacaggactaaagtgcctccatttgaaaacattgaactttacaatgttatgtgcgatctcctaggcttgaagcccgctcccaataatggaactcatggaagcttgaatcacctactgcgtacaaatacctttaggccaaccatgccagacgaagtcagccgacctaactacccagggattatgtaccttcagtccgagtttgacctgggctgcacctgtgacgataaggtagagccaaagaacaaattggaagaactcaataaacgtcttcataccaaaggatcaacagaagctgaaaccgggaaattcagaggcagcaaacatgaaaacaagaaaaaccttaatggaagtgttgaacctagaaaagagagacatctcctgtatggacggcctgcagtgctctatcggactagctatgatatcttataccatacggactttgaaagtggttatagtgaaatattcttaatgcctctctggacatcgtataccatttctaagcaggctgaggtctccagcatcccagaacacctgaccaactgtgttcgtcctgatgtccgtgtgtctccaggattcagtcagaactgtttagcttataaaaatgataaacagatgtcatatggattcctttttcctccctacctgagctcctccccagaagctaagtatgatgcattcctcgtaaccaacatggttccaatgtaccccgccttcaaacgtgtttgggcttatttccaaagggttttggtgaagaaatatgcttcagaaaggaatggagtcaacgtaataagtggaccgatttttgactacaattacgatggcctacgtgacactgaagatgaaattaaacagtatgtggaaggcagctctatacctgtccccacccactactacagcatcatcaccagctgcctggacttcactcagcctgcagacaagtgtgacggtcccctctctgtgtcttccttcatccttcctcaccgacccgacaatgatgagagctgtaatagctccgaggatgagtcgaagtgggtagaggaactcatgaagatgcacacagctcgggtgcgggacattgagcacctcactggtctggatttctaccggaagactagccgtagctattcggaaattctgaccctcaagacatacctgcatacatatgagagcgagatttaactttctgggcctgggcagtgtagtcttagcaactggtgtatatttttatattgtgtttgtatttattaatttgaaccaggacacaaacaaacaaagaaacaaacaaataaaaaaaaaaaccacttagtattttaatcctgtaccaaatctgacatattaagctgaatgactgtgctattttttttccttaattcttgatttagacagagttgtgttctgagcagagtttatagtgaacactgaggctcacaatccaagtagaagctacgtggatctacaaggtgctgcaggttgaaaatttgcattgaggaaatattagttttccagggcacagtcaccacgtgtagttctgttctgttttgaaagactgattttgtaaaggtgcattcatctgctgttaactttgacagacatatttatgccttatagaccaagcttaaatataataaatcacacattcagatttt

SEQ ID NO: 2117 - protein, 885 aa, Rattus norvegicus
  ref <308>: DATABASE ACCESSION NUMBER: Refseq / NP_476445
  ref <309>: DATABASE ENTRY DATE: 2003-01-13
MARQGCLGSFQVISLFTFAISVNICLGFTASRIKRAEWDEGPPTVLSDSPWTNTSGSCKGRCFELQEVGPPDCRCDNLCKSYSSCCHDFDELCLKTVRGWECTKDRSGEVRNEENACHCPEDCLSRGDCCTNYQVVCKGESHWVDDAARNQSSECLQVCPPPLIIFSVDGFRASYMKKGSKVMPNIEKLRSCGTHVPYTRPVYPTKTFPNLYTLATGLYPESHGIVGNSMYDPVFDASFHLRGREKFNHRWWGGQPLWITATKQGVRAGTFFWSVSIPHERRILTILQWLSLPDNERPSVYAFYSEQPDFSGHKYGPFGPEMTNPLREIDKTVGQLMDGLKQLRLHRCVNVIFVGDHGMEDVTCDRTEFLSNYLTNVDDITLVPGTLGRIRAKSINNSKYDPKTIIANLTCKKPDQHFKPYMKQHLPKRLHYANNRRIEDIHLLVDRRWHVARKPLDVYKKPSGKCFFQGDHGFDNKVNSMQTVFVGYGPTFKYRTKVPPFENIELYNVMCDLLGLKPAPNNGTHGSLNHLLRTNTFRPTMPDEVSRPNYPGIMYLQSEFDLGCTCDDKVEPKNKLEELNKRLHTKGSTEAETGKFRGSKHENKKNLNGSVEPRKERHLLYGRPAVLYRTSYDILYHTDFESGYSEIFLMPLWTSYTISKQAEVSSIPEHLTNCVRPDVRVSPGFSQNCLAYKNDKQMSYGFLFPPYLSSSPEAKYDAFLVTNMVPMYPAFKRVWAYFQRVLVKKYASERNGVNVISGPIFDYNYDGLRDTEDEIKQYVEGSSIPVPTHYYSIITSCLDFTQPADKCDGPLSVSSFILPHRPDNDESCNSSEDESKWVEELMKMHTARVRDIEHLTGLDFYRKTSRSYSEILTLKTYLHTYESEI

SEQ ID NO: 2118 - DNA, 3231 bp, Homo sapiens
  ref <308>: DATABASE ACCESSION NUMBER: Refseq / NM_006209
  ref <309>: DATABASE ENTRY DATE: 2002-04-08
cgtgaaggcaaagagaacacgctgcaaaaggcttccaagaatcctcgacatggcaaggaggagctcgttccagtcgtgtcagataatatccctgttcacttttgccgttggagtcagtatctgcttaggattcactgcacatcgaattaagagagcagaaggatgggaggaaggtcctcctacagtgctatcagactccccctggaccaacatctccggatcttgcaagggcaggtgctttgaacttcaagaggctggacctcctgattgtcgctgtgacaacttgtgtaagagctataccagttgctgccatgactttgatgagctgtgtttgaagacagcccgtggctgggagtgtactaaggacagatgtggagaagtcagaaatgaagaaaatgcctgtcactgctcagaggactgcttggccaggggagactgctgtaccaattaccaagtggtttgcaaaggagagtcgcattgggttgatgatgactgtgaggaaataaaggccgcagaatgccctgcagggtttgttcgccctccattaatcatcttctccgtggatggcttccgtgcatcatacatgaagaaaggcagcaaagtcatgcctaatattgaaaaactaaggtcttgtggcacacactctccctacatgaggccggtgtacccaactaaaacctttcctaacttatacactttggccactgggctatatccagaatcacatggaattgttggcaattcaatgtatgatcctgtatttgatgccacttttcatctgcgagggcgagagaaatttaatcatagatggtggggaggtcaaccgctatggattacagccaccaagcaaggggtgaaagctggaacattcttttggtctgttgtcatccctcacgagcggagaatattaaccatattgcggtggctcaccctgccagatcatgagaggccttcggtctatgccttctattctgagcaacctgatttctctggacacaaatatggccctttcggccctgaggagagtagttatggctcaccttttactccggctaagagacctaagaggaaagttgcccctaagaggagacaggaaagaccagttgctcctccaaagaaaagaagaagaaaaatacataggatggatcattatgctgcggaaactcgtcaggacaaaatgacaaatcctctgagggaaatcgacaaaattgtggggcaattaatggatggactgaaacaactaaaactgcgtcggtgtgtcaacgtcatctttgtcggagaccatggaatggaagatgtcacatgtgatagaactgagttcttgagtaattacctaactaatgtggatgatattactttagtgcctggaactctaggaagaattcgatccaaatttagcaacaatgctaaatatgaccccaaagccattattgccaatctcacgtgtaaaaaaccagatcagcactttaagccttacttgaaacagcaccttcccaaacgtttgcactatgccaacaacagaagaattgaggatatccatttattggtggaacgcagatggcatgttgcaaggaaacctttggatgtttataagaaaccatcaggaaaatgctttttccagggagaccacggatttgataacaaggtcaacagcatgcagactgtttttgtaggttatggcccaacatttaagtacaagactaaagtgcctccatttgaaaacattgaactttacaatgttatgtgtgatctcctgggattgaagccagctcctaataatgggacccatggaagtttgaatcatctcctgcgcactaataccttcaggccaaccatgccagaggaagttaccagacccaattatccagggattatgtaccttcagtctgattttgacctgggctgcacttgtgatgataaggtagagccaaagaacaagttggatgaactcaacaaacggcttcatacaaaagggtctacagaagagagacacctcctctatgggcgacctgcagtgctttatcggactagatatgatatcttatatcacactgactttgaaagtggttatagtgaaatattcctaatgctactctggacatcatatactgtttccaaacaggctgaggtttccagcgttcctgaccatctgaccagttgcgtccggcctgatgtccgtgtttctccgagtttcagtcagaactgtttggcctacaaaaatgataagcagatgtcctacggattcctctttcctccttatctgagctcttcaccagaggctaaatatgatgcattccttgtaaccaatatggttccaatgtatcctgctttcaaacgggtctggaattatttccaaagggtattggtgaagaaatatgcttcggaaagaaatggagttaacgtgataagtggaccaatcttcgactatgactatgatggcttacatgacacagaagacaaaataaaacagtacgtggaaggcagttccattcctgttccaactcactactacagcatcatcaccagctgtctggatttcactcagcctgccgacaagtgtgacggccctctctctgtgtcctccttcatcctgcctcaccggcctgacaacgaggagagctgcaatagctcagaggacgaatcaaaatgggtagaagaactcatgaagatgcacacagctagggtgcgtgacattgaacatctcaccagcctggacttcttccgaaagaccagccgcagctacccagaaatcctgacactcaagacatacctgcatacatatgagagcgagatttaactttctgagcatctgcagtacagtcttatcaactggttgtatatttttatattgtttttgtatttattaatttgaaaccaggacattaaaaatgttagtattttaatcctgtaccaaatctgacatattatgcctgaatgactccactgtttttctctaatgcttgatttaggtagccttgtgttctgagtagagcttgtaataaatactgcagcttgagaaaaagtggaagcttctaaatggtgctgcagatttgatatttgcattgaggaaatattaattttccaatgcacagttgccacatttagtcctgtactgtatggaaacactgattttgtaaagttgcctttatttgctgttaactgttaactatgacagatatatttaagccttataaaccaatcttaaacataataaatcacacattcagtttt

SEQ ID NO: 2119 - protein, 915 aa, Homo sapiens
  ref <308>: DATABASE ACCESSION NUMBER: Refseq / NP_006200
  ref <309>: DATABASE ENTRY DATE: 2002-04-08
MARRSSFQSCQIISLFTFAVGVSICLGFTAHRIKRAEGWEEGPPTVLSDSPWTNISGSCKGRCFELQEAGPPDCRCDNLCKSYTSCCHDFDELCLKTARGWECTKDRCGEVRNEENACHCSEDCLARGDCCTNYQVVCKGESHWVDDDCEEIKAAECPAGFVRPPLIIFSVDGFRASYMKKGSKVMPNIEKLRSCGTHSPYMRPVYPTKTFPNLYTLATGLYPESHGIVGNSMYDPVFDATFHLRGREKFNHRWWGGQPLWITATKQGVKAGTFFWSVVIPHERRILTILRWLTLPDHERPSVYAFYSEQPDFSGHKYGPFGPEESSYGSPFTPAKRPKRKVAPKRRQERPVAPPKKRRRKIHRMDHYAAETRQDKMTNPLREIDKIVGQLMDGLKQLKLRRCVNVIFVGDHGMEDVTCDRTEFLSNYLTNVDDITLVPGTLGRIRSKFSNNAKYDPKAIIANLTCKKPDQHFKPYLKQHLPKRLHYANNRRIEDIHLLVERRWHVARKPLDVYKKPSGKCFFQGDHGFDNKVNSMQTVFVGYGPTFKYKTKVPPFENIELYNVMCDLLGLKPAPNNGTHGSLNHLLRTNTFRPTMPEEVTRPNYPGIMYLQSDFDLGCTCDDKVEPKNKLDELNKRLHTKGSTEERHLLYGRPAVLYRTRYDILYHTDFESGYSEIFLMLLWTSYTVSKQAEVSSVPDHLTSCVRPDVRVSPSFSQNCLAYKNDKQMSYGFLFPPYLSSSPEAKYDAFLVTNMVPMYPAFKRVWNYFQRVLVKKYASERNGVNVISGPIFDYDYDGLHDTEDKIKQYVEGSSIPVPTHYYSIITSCLDFTQPADKCDGPLSVSSFILPHRPDNEESCNSSEDESKWVEELMKMHTARVRDIEHLTSLDFFRKTSRSYPEILTLKTYLHTYESEI

SEQ ID NO: 2120 - DNA, 3043 bp, Rattus norvegicus
  ref <308>: DATABASE ACCESSION NUMBER: Refseq / NM_080787
  ref <309>: DATABASE ENTRY DATE: 2002-11-05
ggaagacagaagcgtgggagtggagaaagtggcacaaaccagagccctggagatactctggaaacgcggagcagattgtgttggaaagctggcaacagcggtggtctcgggcgcggcgggagggcaggctgggtcgggggcgggcagtgtgtcgtcaggagctgggcggccccgcggcggccgcgtcttcctagcccatcccctcaagcccagctcgggctccggcgccccagctccgaccgtgcgctctcctgggtcaagttagagcccaccgagagccccgcgccactcgcgcactctcgcacccgggcagaaggactgcggaaggggccgccccacgggctgggtgagggctgcagcgtccagagaaggaagcgttgacagctggagccggctgctggaagggtttgcgccgggacgcgggggttgccgtagcgctacgcaagacggggcttaccctctgaaaagcaaacataagaggctgtacaaccaggttatctctgcgatcagcctcaagcagagaagaaagatggccaaagacaagggcctcatcagcccagaagactttgcccagctgcaaaagtacatagactactccaccaaaagtgtcagcgatgtgctgaaggtctttgagatgaacaaatattgccaaggagatgagattgggtacctgggatttgaacagttcctgaaaatgtatctggaagtggaggaggttccccatcacctatgctggactctgttttggtccttccatagcagtcaagacttggatgaggagactgagtcaaaagccaatgtgatctgtctcagtgacgtctactgctacttcaccctcctggaaggcggcagtccggaagacaagctagagttcaccttcaagctgtacgacatggacagaaatgggatcctagacagcacagaagtagaaaaaatcatcctgcaaatgatgagagtggctgaatatctggactgggatgtgtctgagctgagaccgatccttcaggagatgatgaaagagatggaccgggatggcagtggctgtgtctccctagctgagtgggtccgggctggggctaccactgtgcccctgcttgtccttctggggatagacatgactatgaaagatgatggacaccatatatggagacccaagagattctccagaccggtctactgcaacctgtgcgagttgagcattggcctcggcaaacaaggcctgagctgtaacctctgtaagtacattgttcatgaccactgtgccatgaaggcccagccttgtgaagtcagcacctatgccaagtctcggaaagacattggtgtccagccacacgtatgggttcgaggaggctgtcattctggacgctgcgaccgctgtcagaaaaagatccggacctaccacagcctaacgggactgcactgcgtgtggtgccacctggagatccacgatgactgtctgcaggctgttggtcccgagtgtgactgtggactgctccgtgatcatatcctgcctccgtgttctatctaccccagggtcctggtatctggacaggagtgcaaacagaagaccacagatgttacgagcctgtgcacccctgaggcttttcggattgaacctgtttctaacacccacccccttctggtcttcatcaatcctaagagcggaggcaagcaggggcagagcgtgctttggaagttccagtacattctgaaccctcggcaggtgtttaacctgaaggatggtccggagccagggctcaggtttttcaaagacgttcctcagttccgggtgttggtgtgtggtggagacggcaccgtaggctggattctagagaccattgacaaagccaactttcccattgtgcctccagtcgctgtgttgcccctgggcactggaaatgacctggctcggtgcctaagatggggaagaggttatgaaggtgagaacttgagaaagattctcaaggatatagagataagtaaggtggtatatctcgatcgatggctcctggaagtgataccccaacaaaacggagaaaagagtgatccagttccctctcaaatcatcaataactacttctccattggtgtggatgcttccattgctcaccggttccatctcatgagagagaaataccctgagaagttcaatagcagaatgaagaacaagctttggtacttggagtttgccacatcggagtccatcttctcaacgtgcaaaaagctggaagagtcagtgaccgtcgagatatgtgggaagctgctggatctgagtgacctgtccctcgaaggcattgcggtattgaatatcccgagcatgcatggtggctccaatctctggggtgacaccaagagacctcacggggatacgtgtgggatcaaccaggcactgggcagtgtggccaaaataatcacagaccccgatattctcaaaacctgtgtgccagacatgagtgacaagcggctggaagtcgtaggaatagagggtgtgattgagatgggtcagatctataccaggctcaagagtgctggacaccggctggccaagtgctccgagatcacgttccagaccacaaaaaccctccctatgcaagttgatggagaaccctggatgcaagcaccctgtacaatcaagatcacccataagaaccagatgcctatgctaatgggtccggctcccagttcctccaatttctttggcttttggagctgaggatggatgccatctgccttgagcccacctccctgttcctggagatttcccactatctagatgctgccacaccttcctgccagcccagaaggatgttccatcaccttcacagtatttattatcctccgccacctcactgctcccacacagacatccttacacaaccagcgatgcgtaaccttgaaaatgcctcatctaataaagtgactttttccatcactgggatatctgttaaaatgagcgacacatctctttttacaccttcacccctctacagacagatttaaaagcagacagaacaaataaatgaacaaagaaagcctaaaaaaa

SEQ ID NO: 2121 - protein, 727 aa, Rattus norvegicus
  ref <308>: DATABASE ACCESSION NUMBER: Refseq / NP_542965
  ref <309>: DATABASE ENTRY DATE: 2002-11-05
MAKDKGLISPEDFAQLQKYIDYSTKSVSDVLKVFEMNKYCQGDEIGYLGFEQFLKMYLEVEEVPHHLCWTLFWSFHSSQDLDEETESKANVICLSDVYCYFTLLEGGSPEDKLEFTFKLYDMDRNGILDSTEVEKIILQMMRVAEYLDWDVSELRPILQEMMKEMDRDGSGCVSLAEWVRAGATTVPLLVLLGIDMTMKDDGHHIWRPKRFSRPVYCNLCELSIGLGKQGLSCNLCKYIVHDHCAMKAQPCEVSTYAKSRKDIGVQPHVWVRGGCHSGRCDRCQKKIRTYHSLTGLHCVWCHLEIHDDCLQAVGPECDCGLLRDHILPPCSIYPRVLVSGQECKQKTTDVTSLCTPEAFRIEPVSNTHPLLVFINPKSGGKQGQSVLWKFQYILNPRQVFNLKDGPEPGLRFFKDVPQFRVLVCGGDGTVGWILETIDKANFPIVPPVAVLPLGTGNDLARCLRWGRGYEGENLRKILKDIEISKVVYLDRWLLEVIPQQNGEKSDPVPSQIINNYFSIGVDASIAHRFHLMREKYPEKFNSRMKNKLWYLEFATSESIFSTCKKLEESVTVEICGKLLDLSDLSLEGIAVLNIPSMHGGSNLWGDTKRPHGDTCGINQALGSVAKIITDPDILKTCVPDMSDKRLEVVGIEGVIEMGQIYTRLKSAGHRLAKCSEITFQTTKTLPMQVDGEPWMQAPCTIKITHKNQMPMLMGPAPSSSNFFGFWS

SEQ ID NO: 2122 - DNA, 3274 bp, Rattus norvegicus
  ref <308>: DATABASE ACCESSION NUMBER: EMBL / U09229
  ref <309>: DATABASE ENTRY DATE: 2000-03-04
atcacgacccggatccgagcatctgagactggttctgatgaagccatcaagtccatcctagaacaagccaagagggaactccaagtgcagaaaaccgctgagccagtccaggcgtcttccacagccagcagtgggaactccgacgatgccatccgctccatcctacagcaggcccgccgggaaatggaggcccagcaggctgcccttgaccccgccttaaagccagcaccactgtcccagcccgacctcaccatcctcaaccccaagctcctgtctgcctcacccatgtctactgtgtccacttacccccctcttgccatctccctgaagaaaacccctgcagcacctgaggccagtacctcagccttgcccagtgccccagccctcaaaaaagaggctcaggatgcacccacactggacccaccaggatcagctgatgctaccccgggggtactgaggccggtgaagaatgagctagtccgtggcagcacctggaaggatccttggtggaaccctgtacagcctgaaagaagaaatcttaccacttccgaagagaccaaggccgatgaaacaaatgcaagtgggaaagaaaagacaggcagcagccaacctcgggctgagcgcagccagcttcagggaccctcggcgacagcagagtactggaaagagtggcccaacgctgagtccccatactcccagagctcagagctgagcctcactggagccagccgcagtgagacaccccagaatagcccactgccctcttccccaattgtgcccatggcaaagccggccaagccttccgtgcccccgctgactcctgagcagtatgaggtctacatgtatcaggaagtggacaccatcgagctcactcggcaggtcaaagagaagttggccaaaaatggcatttgccagaggatctttggggagaaggtactgggcctgtcccagggcagcgtcagcgacatgctctcaaggccaaaaccatggagcaaactgacccagaaaggccgagaacccttcatccggatgcagctctggctgaatggagagctgggccaaggtgttctgcctgtgcaagggcaacaacaaggaccagtccttcactcagtgacgtctctgcaggaccccctccagcagggctgtgtgagttcagaaagcactccaaagacctctgccagctgcagccctgcccctgagtccccaatgagttccagcgaatctgtgaagagtctcactgagctggtccaacagccctgtcccaccattgagaccagtaaagaaggcaaaccaccagaacccagtgacccacccacctcagactcccaacccacaacaccgctgcctctctctggacactcagccctcagcatccaagaattagtagccatgtctcctgagctggacacctatggcataaccaagagggtcaaagaggtgctgacggacaacaacctcggtcagcgcttatttggagagaccattctggggctcacccagggttctgtctccgacctccttgcccgcccaaagccctggcataagcttagtctgaaaggacgggagccctttgtccgcatgcagctatggctcaacgaccccaacaatgtggagaagctgatggatatgaagcggatggagaagaaagcctacatgaagaggcgacacagctctgtcagtgacagtcagccttgtgaacccccctctgttggtatcgactatagccagggtgccagcccccagccacaacaccagctgaagaaacctcgagtggtcctggctccagaggagaaggaagcactgaagcgagcatatcagcagaagccatacccatcaccaaaaaccatcgaggagcttgccacacaactcaacctgaagactagcaccgtcatcaactggttccataattacaggtctcggatccgcagagaactgttcattgaggagattcaagccggaagccagggccaggccggtgccagcgactcaccttcagctcgaagtagccgggctgcacccagctctgaaggcgacagttgtgacggcgtggaagccgctgacaccgaggagccaggtggcaacatagtggccaccaagtctcagggagggccggcagaggtgaccgcagccccggcagaccgggaagaagcgacgcagccggccgagaaggcgaaggcacagccactatcctcggggaccccaggacaagacgacggtgaagacgcaggccggtctaggccacctcctgagggtcttgctgacgccccagcgcccgtgccaaacctcgccgcacccgcggccggagaggacgccgctacctcagccactgccccagccatggccactgaggcccctggggcggccagggccggccctgccgagaggagttctgcgttgccaagcaccagcgcgcctgccaacgcgcctgcgcgaaggcctagctctctgcagagcctctttggtctgcctgaggcagcgggcgcccgggacaacccggtgcggaagaagaaggccgcgaacttgaacagcatcatccaccgcctggagaaggctgccagccgggaggagcccattgaatgggagttctgagggcgccgggcctctgggcctgaccagcagggcctcgccgggctagccaggcctacttgcgcctagcaggtcccccaggcctagtcagcactggctagtggtgggctggggcaggcgggtgcgtggagggctgtgctgacccgaggcctggacgtgttgcgcacttaccgccctgcgggccacagggcaaaatcgccataggccaaggtgcatatagaaaacaaaggagcattaagcccaatctatgttgtgttttcaaggaagaaaacggaaatgtgtagtcaagcttttttgtaccctgaagtgttttttttttaattgccctaagtgatttccacaggttctggaataactctttacagcttttgccttgcgccctcctctttcgtgtgggctttaaaaaaaaaaaatcaaacccacatattaaaagggggctttttatctgccatctaatggcttcagagcgataatacactattatcttcttaaaccaggaagggggggattttttcagaaaaattaaaaaagaaagtttttgtagctgttcagttgccactaagagattgcacagtcaaaccgactctaaacacactagtttggattcctaaatattttcaagaaaagaatcttctcgtttgaaactttgaattaaaataaaacacatttactccacatattttttaac

SEQ ID NO: 2123 - DNA, 2855 bp, Homo sapiens
  ref <308>: DATABASE ACCESSION NUMBER: Refseq / NM_001913
  ref <309>: DATABASE ENTRY DATE: 2002-10-09
cgtctcaatatgtctcaagatggccgccaatgtgggatcgatgtttcaatattggaagcgctttgatttacagcagctgcagagagaactcgatgccaccgcaacggtattggcgaaccggcaggatgaaagtgagcagtccagaaagcggcttatcgaacagagccgggagttcaagaagaacactccagaggatttgcgcaagcaggtagcgccgctgctgaagagtttccaaggagagattgatgcactgagtaaaagaagcaaggaagctgaagcagctttcttgaatgtctacaaaagattgattgacgtcccagatcccgtaccagctttggatctcggacagcaactccagctcaaagtgcagcgcctgcacgatattgaaacagagaaccagaaacttagggaaactctggaagaatacaacaaggaatttgctgaagtgaaaaatcaagaggttacgataaaagcacttaaagagaaaatccgagaatatgaacagacactgaagaaccaagccgaaaccatagctcttgagaaggaacagaagttacagaatgactttgcagaaaaggagagaaagctgcaggagacacagatgtccaccacctcaaagctggaggaagctgagcataaggttcagagcctacaaacagccctggaaaaaactcgaacagaattatttgacctgaaaaccaaatacgatgaagaaactactgcaaaggccgacgagattgaaatgatcatgacggaccttgaaagggcaaaccagagggcagaggtggctcagagagaggcggagaccttaagggaacagctctcatcggccaatcactccctccagctggcctcacagatccagaaggcaccagacgtggagcaggccatagaggtgctgacccgctccagcctagaagttgagttggccgccaaggagcgggagatcgcacagctggtggaggacgtgcagagactccaggccagcctcaccaagctgcgggagaattcggccagccagatctcacagcttgagcagcagctgagcgccaaaaacagcacactcaaacaactggaagaaaaactcaaaggccaggctgactatgaagaggtgaagaaagagctgaacattctgaagtccatggagtttgcaccgtccgagggcgctgggacacaggatgcggccaagcccctggaggtgctgttgctggagaagaaccgctcgctgcagtccgagaacgccgcgctgcgcatctccaacagcgacctgagcggacgctgtgcagagctgcaagtccgtatcactgaggctgtggccacagccactgagcagagagagctgatcgcccgcctggagcaggacctgagcatcattcagtccatccagcggcccgatgccgagggtgccgctgagcaccgcctggagaagatcccagagcccatcaaagaggccactgccctattctacggacctgcagcaccagccagcggtgccctcccagagggccaggtggattcactgctttccatcatctccagccagagggagcgcttccgtgcccggaaccaggagcttgaggccgagaaccgcctggcccagcacaccctccaggccctgcagagtgagctggacagcctgcgcgccgacaacatcaagctctttgagaagatcaagttcctgcagagctaccctggccggggcagcggcagtgatgacacggagctgcggtactcgtcccagtacgaggagcgcctggaccccttctcctccttcagcaagcgggagcggcagaggaagtacctgagcttgagtccctgggacaaggccaccctcagcatggggcgtctggttctctccaacaagatggcgcgcaccatcggcttcttctacacactgttcctgcactgcctggtcttcctggtgctctacaagctggcatggagcgagagcatggagagggactgtgccaccttctgcgccaagaagctcgctgaccacctgcacaagttccacgagaatgacaacggggctgcggctggtgacttgtggcagtgataccccggggcctcccccgtgacagtgacggctgcgcctccaccccgactgctcagtgcatctaatcacttagactcccctgaagaatcccccatggaaactgcccttatccgctgtccagcagctgccagaggccccaggtcacctcgggtccccttgaaagaatgtctcggtcacatcaggcccgctaggtccagagagcgagcccccaatgcccggccaggctaagccgcagagaccctctcagcccccacctcaggttagggctctgcccgcagcctgacctctagccctggtggcagaggtccctcagctgcgaggctaattgggtgaccaccgattccagctgcggttaatccagcttgggcctgtctgcactgcgatcctcttgggctctcctaggatccccccatgccccgtaagaggtggaagacgcttccttccaggacagcaggctttggagtccgacacccccagcctgcctttgccaccagccccaaccctgcagagatatgaggcttgacagagtctgccccctcccccactgcaccccaagagagagagccccagccagcggaacagtttctattaccccctccctgcccccagacccatgtgatttctgctttcttctttagcaagatattctggtttctagataaggaagagtctctaatgagcccccgagccccagtctcttcagactcatggattggtctgaggggtctgaacgtctcctagccaatcagaactggctgtggaccaccctagcacggccacctctcagggcactggcagg

SEQ ID NO: 2124 - protein, 678 aa, Homo sapiens [sequence omitted]

SEQ ID NO: 2125 - DNA, 511 bp, Rattus norvegicus
  ref <308>: DATABASE ACCESSION NUMBER: EMBL / AA875084
  ref <309>: DATABASE ENTRY DATE: 2000-03-03
gctcaggggacaaaaaggctaccgtttatgaggtcatctactgagaataccatggcttcatatttacagttgaattgggccaaatgtttggaatttgtagaaatagaacttataatttaaaaaaaacaaaaacaacatcaaaaaaactgaagaaacctgtttccaaatcttgacacagaactgctttgcgtctacaaaaagaaggcaccaagtctatcagtagacactcacctgtctaactttggacaccacaatcacaccgaggccacaggtgtggaatagaggagcaagctgctgtctgccgtcctgcctttgctgactgcgagcttaccgttctgtttctcgcagttcaattcaccttgagtctttgtagagcagtggtgtctccagtgaacttgtttcttggttttgcatcttgtgatttttttttctttttgtatttttgttgtttcaacatttgtataaattgtaaatatatttggtttattacagtaaaacctttagtaccagt

SEQ ID NO: 2126 - DNA, 231 bp, Rattus norvegicus
  ref <308>: DATABASE ACCESSION NUMBER: EMBL / AA894054
  ref <309>: DATABASE ENTRY DATE: 2000-03-03
gctaatgaaaagtatttccagcacaggatcatcgggtttctgtgcattaagaacagctgagttctgtgctgggtacaaatcctagctgcagataagccccgggacaggggtggtttgagtaggtaggtgtcggggacataataaatggctggtgtcagcaggaatgagggacacagtgggagcaagatgaggaaaggtgtgtttatatacatgaataaactcagtaccatt

SEQ ID NO: 2127 - DNA, 604 bp, Rattus norvegicus
  ref <308>: DATABASE ACCESSION NUMBER: EMBL / M94557
  ref <309>: DATABASE ENTRY DATE: 2002-08-09
aggcttgcgcgtcaggaaaagcctaaagattaggttataagaaaaaccaaagccatgtttcgaagacctgtgttacaggtatttcgtcagtttgtaagacaggagtctgaagtagccagcagtttggttcttgaacgatctttgaatcgtgttcagttacttgggcgagtaggtcaggaccctgtcatgagacaggtggagggaaaaaacccagtcacgatattttctctagcaacaaatgagatgtggcgatcaggggacaatgaagcataccaaatgggtgacgtcagtcaaaagacaacatggcacagaatatcagtgtttcggccaggcctcagagatgtggcttatcagtatgtgaaaaagggggctcgtatatttgtggaaggcaaagtggactatggtgaatacatggataaaaacaatgtgaggcggcaagcaacaacaatcatagctgataacattatatttctgagtgaccaggcaagagaaaagccattgaacggatgattcatcgttgatcattgtttggtacagtctcctttgcaaatcatgtacagtctatagtttaaagacaaaaattaaaatttttatataaaatgag

SEQ ID NO: 2128 - protein, 152 aa, Rattus norvegicus
  misc_feature (1)..(152): Xaa=Unknown amino acid
MFRRPVLQVFRQFVRQESEVASSLVLERSLNRVQLLGRVGQDPVMRQVEGKNPVTIFSLATNEMWRSGDNEAYQMGDVSQKTTWHRISVFRPGLRDVAYQYVKKGARIFVEGKVDYGEYMDKNNVRRQATTIIADNIIFLSDQAREKPLNGX

SEQ ID NO: 2129 - DNA, 2804 bp, Rattus norvegicus
  ref <308>: DATABASE ACCESSION NUMBER: Refseq / NM_133572
  ref <309>: DATABASE ENTRY DATE: 2003-01-13
ggggggggggttatttttcgaatatataaggaggtggaggtggcagcagcccagctcgcgtcttcccctcccttcctccccacatccctctcctcactcccaggcccactgctcttcctccctccctcccctccctccttccccttaccccaggctcactctcggagcctagccagctgggtcggcgtctgctggcgcggtatcttgtggccctctagctagcctttgcccgccccgccaccatggaggtacccccgcagaagtctgcgccgggctcagctctcagtactgcccgcgtgctgggtggcattcagcggccgcgccacctctcaggctttgggtttgggtctgatggcttgctggggtctccagagcgtgcggcttcctcctctccggttaccactcttacccagaccatgtacaacctcgcagggctcggcagcgagaccccaaaaactcaagtaggaagcctgtcgttccagaacaggctgacagacctgtccctgtccagacgtacctctgagtgctccctgtcatctgagtcctcagaatcttctgatgcaggtctctgcatggactcccctagccctatggacccacagacagcagagcgcacgtttgaacaggccattcaggcagccagtcgggtcattcaaaagatgcaatttaccataaaagcttcggtctttgccagtgaggctgctggacatagtcctgtgctacagaacatcaccaactcccaagcactggacagctgggagaaagatgaagcaggctacagagctgccagtagtcctggggaggacaaagagaacgatggatatatcttcaagatgccacagaagctccctcattccagctctgcccgagctttggcagagtgggccagccgcagagaggcctttacccagaggcccagctcagcccctgacttgatgtgtcttaccactgacgggaagatggacgtggaggaggcgagccctgtggcacagtcttcctccttgactcctgtcgaaagggcttgtgaagaagatgacggatttgtggacatcctagagagtgatttaaaggatgatgatatggtccccgcaggcatggagaacctcattagtgctccactggtcaaaaagctggataaggaagaggaacaggatctcatcatgttcagcaagtgccagcggcttttccgctctccatccatgccgtgcagtgtgatccggcccatcctcaagaggctagagcggccccacgacagggacgtgcctgtcctgagcaagcgcaggaagagtgggacacccctggaagagcagcagcttgaagaacccaaggcccgggtcttccgctcaaagtccctgtgtcacgagattgagagcatcctggacagtgaccaccgtggcctgattggagattactctaaggccttcctcctgcagactgtggatggcaaacaccaagacctcaagtacatctcaccagaaactatggtggccctgttgacaggcaagttcagcaacatcgtggagaagtttgtaattgtggactgcagatacccctatgagtatgaaggcgggcatatcaagaatgctgtgaacttgcccctggaaccggatgccgagacctttctgctgaagcatcccatcacgccttgtaacctggacaagagaatcatcctcattttccactgtgaattctcatctgagcgtggaccacggatgtgccgcttcatcagggaacgggaccgtgcagctaacgactatcccagcctgtactaccctgagatgtacatcctcaaaggcggctacaaggagttcttcccgcagcatccgaacttttgtgagccccaggactaccgacccatgaaccatgcagctttccgggatgagctgaggaacttccgcctcaagacacgcagctgggctggggaacggagtaccacccaactctgtagcaggctgcaagaccagtgacgagccagcctcagtcctgccaccatccttacctcaggaggcttgcgagccagtgggtcccatgggcctatgcggccacctacttgctagaggcctcaggtgctatagggggttggggggatggtgtggtgtcacatctgtctgtccctgtcctcaattttcctgtctcactccactaattttctgtatcttggatctgatcccatcttaaagagctgaaccaatgggtgaataccagctaagaggaagtcctttgtgttcaatgagagcccttttacaatctcctttttccttgtttgtgttgactccttgtcttaccccttcgcagggagagcctcagccctttaagatgagcacagtagcttcttgggtagcctggattgcaggacgctacactgctgcacagggctgtgtctgctctcctctcctggcctctgcacagattcctccattggaagcataagtgcttagtttcctgttgtcgtcttacccatagctttcattttcgtctgtctcacttagcgtgtcccaggacacactgacagctggggaggctcccttgtacagctggggactagagattcaaatatcatgtactcattaggcttggcttttgttagcccacaaagggatcttttcctttaagacccccagagctagagcaaaggcctgattcaggagcctctgggagccccatcctcactgctgtgaaccctagagcctcactggtcagcacttgttgctgggcaatgaaccagtcactgagcttcactttttggtccttctctgtccctccctgtccctctctgtccttctttccatatctggtcctgagta

SEQ ID NO: 2130 - protein, 574 aa, Rattus norvegicus
  ref <308>: DATABASE ACCESSION NUMBER: Refseq / NP_598256
  ref <309>: DATABASE ENTRY DATE: 2003-01-13
MEVPPQKSAPGSALSTARVLGGIQRPRHLSGFGFGSDGLLGSPERAASSSPVTTLTQTMYNLAGLGSETPKTQVGSLSFQNRLTDLSLSRRTSECSLSSESSESSDAGLCMDSPSPMDPQTAERTFEQAIQAASRVIQKMQFTIKASVFASEAAGHSPVLQNITNSQALDSWEKDEAGYRAASSPGEDKENDGYIFKMPQKLPHSSSARALAEWASRREAFTQRPSSAPDLMCLTTDGKMDVEEASPVAQSSSLTPVERACEEDDGFVDILESDLKDDDMVPAGMENLISAPLVKKLDKEEEQDLIMFSKCQRLFRSPSMPCSVIRPILKRLERPHDRDVPVLSKRRKSGTPLEEQQLEEPKARVFRSKSLCHEIESILDSDHRGLIGDYSKAFLLQTVDGKHQDLKYISPETMVALLTGKFSNIVEKFVIVDCRYPYEYEGGHIKNAVNLPLEPDAETFLLKHPITPCNLDKRIILIFHCEFSSERGPRMCRFIRERDRAANDYPSLYYPEMYILKGGYKEFFPQHPNFCEPQDYRPMNHAAFRDELRNFRLKTRSWAGERSTTQLCSRLQDQ

SEQ ID NO: 2131 - DNA, 3195 bp, Homo sapiens
  ref <308>: DATABASE ACCESSION NUMBER: Refseq / NM_021874
  ref <309>: DATABASE ENTRY DATE: 2001-02-03
agaggcttccctggctggtgcctgagcccggcgtccctcgccccccgccctccccgcatccctctcctccctcgcgcctggccctgtggctcttcctccctccctccttccccccccccccacccctcgcccgctgcctccctcggcccagccagctgtgccggcgtttgttggctgccctgcgcccggccctccagccagccttctgccggccccgccgcgatggaggtgccccagccggagcccgcgccaggctcggctctcagtccagcaggcgtgtgcggtggcgcccagcgtccgggccacctcccgggcctcctgctgggatctcatggcctcctggggtccccggtgcgggcggccgcttcctcgccggtcaccaccctcacccagaccatgcacgacctcgccgggctcggcagccgcagccgcctgacgcacctatccctgtctcgacgggcatccgaatcctccctgtcgtctgaatcctccgaatcttctgatgcaggtctctgcatggattcccccagccctatggacccccacatggcggagcagacgtttgaacaggccatccaggcagccagccggatcattcgaaacgagcagtttgccatcagacgcttccagtctatgccggtgaggctgctgggccacagccccgtgcttcggaacatcaccaactcccaggcgcccgacggccggaggaagagcgaggcgggcagtggagctgccagcagctctggggaagacaaggagaatgtgcgcttctggaaggccggggtgggagctctccgggaagaggagggggcatgctggggtggttccctggcatgtgaggaccctcctctcccatcttggctgcaggatggatttgtcttcaagatgccatggaagcccacacatcccagctccacccatgctctggcagagtgggccagccgcagggaagcctttgcccagagacccagctcggcccccgacctgatgtgtctcagtcctgaccggaagatggaagtggaggagctcagccccctggccctaggtcgcttctctctgacccctgcagagggggatactgaggaagatgatggatttgtggacatcctagagagtgacttaaaggatgatgatgcagttcccccaggcatggagagtctcattagtgccccactggtcaagaccttggaaaaggaagaggaaaaggacctcgtcatgtacagcaagtgccagcggctcttccgctctccgtccatgccctgcagcgtgatccggcccatcctcaagaggctggagcggccccaggacagggacacgcccgtgcagaataagcggaggcggagcgtgacccctcctgaggagcagcaggaggctgaggaacctaaagcccgcgtcctccgctcaaaatcactgtgtcacgatgagatcgagaacctcctggacagtgaccaccgagagctgattggagattactctaaggccttcctcctacagacagtagacggaaagcaccaagacctcaagtacatctcaccagaaacgatggtggccctattgacgggcaagttcagcaacatcgtggataagtttgtgattgtagactgcagatacccctatgaatatgaaggcgggcacatcaagactgcggtgaacttgcccctggaacgcgacgccgagagcttcctactgaagagccccatcgcgccctgtagcctggacaagagagtcatcctcattttccactgtgaattctcatctgagcgtgggccccgcatgtgccgtttcatcagggaacgagaccgtgctgtcaacgactaccccagcctctactaccctgagatgtatatcctgaaaggcggctacaaggagttcttccctcagcacccgaacttctgtgaaccccaggactaccggcccatgaaccacgaggccttcaaggatgagctaaagaccttccgcctcaagactcgcagctgggctggggagcggagccggcgggagctctgtagccggctgcaggaccagtgaggggcctgcgccagtcctgctacctcccttgcctttcgaggcctgaagccagctgccctatgggcctgccgggctgagggcctgctggaggcctcaggtgctgtccatgggaaagatggtgtggtgtcctgcctgtctgccccagcccagattcccctgtgtcatcccatcattttccatatcctggtgccccccacccctggaagagcccagtctgttgagttagttaagttgggttaataccagcttaaaggcagtattttgtgtcctccaggagcttcttgtttccttgttagggttaacccttcatcttcctgtgtcctgaaacgctcctttgtgtgtgtgtcagctgaggctggggagagccgtggtccctgaggatgggtcagagctaaactccttcctggcctgagagtcagctctctgccctgtgtacttcccgggccagggctgcccctaatctctgtaggaaccgtggtatgtctgccatgttgcccctttctcttttcccctttcctgtcccaccatacgagcacctccagcctgaacagaagctcttactctttcctatttcagtgttacctgtgtgcttggtctgtttgactttacgcccatctcaggacacttccgtagactgtttaggttcccctgtcaaatatcagttacccactcggtcccagttttgttgccccagaaagggatgttattatccttgggggctcccagggcaagggttaaggcctgaatcatgagcctgctggaagcccagcccctactgctgtgaaccctggggcctgactgctcagaacttgctgctgtcttgttgcggatggatggaaggttggatggatgggtggatggccgtggatggccgtggatgcgcagtgccttgcatacccaaaccaggtgggagcgttttgttgagcatgacacctgcagcaggaatatatgtgtgcctatttgtgtggacaaaaatatttacacttagggtttggagctattcaagaggaaatgtcacagaagcagctaaaccaaggactgagcaccctctggattctgaatctcaagatgggggcagggctgtgcttgaaggccctgctgagtcatctgttagggccttggttcaataaagcactgagcaagttgagaaaaaaaaaaaaaaaaaaa

SEQ ID NO: 2132 - protein, 601 aa, Homo sapiens
  ref <308>: DATABASE ACCESSION NUMBER: Refseq / NP_068660
  ref <309>: DATABASE ENTRY DATE: 2001-02-03
MEVPQPEPAPGSALSPAGVCGGAQRPGHLPGLLLGSHGLLGSPVRAAASSPVTTLTQTMHDLAGLGSRSRLTHLSLSRRASESSLSSESSESSDAGLCMDSPSPMDPHMAEQTFEQAIQAASRIIRNEQFAIRRFQSMPVRLLGHSPVLRNITNSQAPDGRRKSEAGSGAASSSGEDKENVRFWKAGVGALREEEGACWGGSLACEDPPLPSWLQDGFVFKMPWKPTHPSSTHALAEWASRREAFAQRPSSAPDLMCLSPDRKMEVEELSPLALGRFSLTPAEGDTEEDDGFVDILESDLKDDDAVPPGMESLISAPLVKTLEKEEEKDLVMYSKCQRLFRSPSMPCSVIRPILKRLERPQDRDTPVQNKRRRSVTPPEEQQEAEEPKARVLRSKSLCHDEIENLLDSDHRELIGDYSKAFLLQTVDGKHQDLKYISPETMVALLTGKFSNIVDKFVIVDCRYPYEYEGGHIKTAVNLPLERDAESFLLKSPIAPCSLDKRVILIFHCEFSSERGPRMCRFIRERDRAVNDYPSLYYPEMYILKGGYKEFFPQHPNFCEPQDYRPMNHEAFKDELKTFRLKTRSWAGERSRRELCSRLQDQ

SEQ ID NO: 2133 - DNA, 2107 bp, Rattus norvegicus
  ref <308>: DATABASE ACCESSION NUMBER: EMBL / E13541
  ref <309>: DATABASE ENTRY DATE: 2000-09-02
gggctccgcgcaatgggccgagctggaggcgggggcccgggctgggggccgccgccagtgctgctgcttctgggggtcacgctggtgctcaccgctggggctgtaccggcacgggaagcaggcagtgcgatcgaggctgaagagctggtgaggagcggccttgcatgggagtcgcgtgccaatgacacgcgggaggaagctggcctgccagcagcaggggaagatgagacctcgtggacagagcggggcagtgagctggctgcggtgggccctggggtcgggccagaggagacactagaggcatcggctgcagtgactgggactgcctggctagaggcagatggcacaggcctgggtggagtgactgcagaggctggtagtggcgacgcccagacccttccagctacactccaggctcctgacgaggcccttgggtcatctacaatgccccctgccatccctgaggctactgaagccagtggacctccctcccccaccctccgtgataaacctagcctagtccctgaactccctaaggagatccccttggaagtttggctgaacctgggaggcagcacacctgaccctcaaaggccagagcctacttttccccttcagggcactctagagacacaaccagcctcagatataattgacattgattactttgaaggattggatagcgagggccgaggcacagacatgggcaggttcccgggctcaccaggaacctcagaaaatcaccctgatactgaaggagagaccccctcctggagcctgcttgacttatatgatgacttcacccctttgatgagtctgatttctaccccaccacatccttctatgatgacttggaagaggaggaagaggaggaggaggataaggatgcagtgggaggcggagacctggaagatgaaagtgacctcctcctgccctctcagaagcctggtgtggggccctgggacgggacagcccaccagtcgatggcatgcagttcctccacagcatactctggggatggtacctggtggcagcatctctcttaggccccgccctggagatccaggcaaggacctggccacgagcgaaaatggaacagagtgccgagttggctttgtcagacacaatggctcctgtcggtcagtctgtgacctcttcccgagttactgtcacaatggcggccaatgctacctggtggagaacataggggctttctgcaggtgtaacacccaggactatatctggcacaaggggatgcgctgtgagtccatcatcaccgacttccaggtgatgtgcgtggccgtcggctcggctgcgttggtgctgctccttctgttcatgatgactgtgttctttgccaagaaactctatctgctcaagactgagaacaccaagctgaggaggaccaacaaattccggaccccatctgagctccacaatgataacttctccctctccaccattgccgagggctcccatccaaatgatgaccccagcgctccccacaaaatccaggaagctctcaagtcccgcctgaaggaggaagagtcctttaacatccagaactccatgtcacccaaactcgagggtggcaaaggtgaccagggatacttggaggtgaactttctccagaataacctgacctgagacggaggagggagaggggagaggggggtgggggagggaaggaccgtggtctcctctcgggcagccggctcctcataaccatttgttaagcttttcctttgctgatctcatggcatgctctgatgtgttttgtaggagggggaaactcttaaaataagcaaagaaaccgagcagggttgcgtacattggatggttctcgtctgtgctctttgtacgttgcttctacagctgtgatttctaagcctatgctggcactcagctgacttgtttttttggttttttggtttttgttttttctgggtttttgttttgttttgttttgttttgtttctttgttttttggtttggtttttttttgtttgtttgtttttgtttttttgtactttgacccacctttttttggaataccagtttaaaaaaacaaaacaaacaaggttcttgaaataaaactttttaaaaa

SEQ ID NO: 2134 - DNA, 647 bp, Rattus norvegicus; identical to SEQ ID NO: 1879
  ref <308>: DATABASE ACCESSION NUMBER: EMBL / AA892557
  ref <309>: DATABASE ENTRY DATE: 2000-03-03

SEQ ID NO: 2135 - DNA, 1904 bp, Homo sapiens; identical to SEQ ID NO: 1880
  ref <308>: DATABASE ACCESSION NUMBER: Refseq / NM_017801
  ref <309>: DATABASE ENTRY DATE: 2002-10-18

SEQ ID NO: 2136 - protein, 183 aa, Homo sapiens; identical to SEQ ID NO: 1881
  ref <308>: DATABASE ACCESSION NUMBER: Refseq / NP_060271
  ref <309>: DATABASE ENTRY DATE: 2002-10-18

SEQ ID NO: 2137 - DNA, 2680 bp, Rattus norvegicus
  ref <308>: DATABASE ACCESSION NUMBER: Refseq / NM_053742
  ref <309>: DATABASE ENTRY DATE: 2003-01-13
gcagctgtgagggcttcccggaagatggtgctgattaaggaattccgtgtagttttgccgtgttctgttcaagagtatcaggttggacagctttactctgttgcagaagcgagtaagaatgaaactggtggtggagaaggaatcgaagtcttgaagaatgaaccttatgaaaatgatggcgagaagggacagtacacacacaaaatctaccacctgaagagcaaagtccctgcgttcgtgaggatgattgctcccgagggctccttggtgttccatgagaaagcctggaatgcttacccctactgcagaacaattgtaacgaatgagtacatgaaagatgacttcttcatcaaaatcgaaacatggcacaaacctgacttgggaacattagaaaatgttcacggtttagatccaaacacgtggaaaaccgttgaaattgtccacatagacattgcagatcgaagtcaggttgaaccagcagactacaaagctgatgaggaccctgcgttattccagtcagtcaagaccaagagaggccccctgggacctaactggaagaaggagctggcaaacacccctgactgtcctaagatgtgtgcctataagctggtgaccatcaagttcaagtggtgggggctgcagagcaaagtagagaacttcatccagaagcaagaaaaacggatatttacaaacttacatcgccagctcttttgttggattgacaagtggattgacctgacaatggaagacattaggagaatggaggacgagactcagaaagaactagaaacaatgcgtaagaagggttccgtccgaggcacgtcggctgctgatgcctagatgagcccctgtaggtcagagacattatcaaactgtctacggagtcaaggccaagtgagggggaccagtgcggcctgcgacgactaaagccaccagcgtctcagtgttgacggatgtttccagtgtgtgcctctgacggctcgggcacacttgtgcacactcgagggcacacacacacccatgcacacacactcacactgtatgtatgtctgtagctgtatgtaaagcacatatggctacaggcctagatacacacgagtgtatatatatatgtacatgtgaagatggatcagtaccttttctccaaagtactgcacctgtcttcagcagaaatactaaagaaaatattttcaatatatatacctggaacagatattaatacccatcaacatgatgccctggatggacaaacggactgccatgtggtgccctgtggtgctggctggcgtgcttcgtgaatgccaggtgtggaccagtgtgtacagcctttggttaggtttctgtttttttcaagtcaccacacacacacacacgtttagtctcaacccatcagcaacaactcctacagaaagattttttcaaatttttagatactccagtgactctggaatgtaaactctggatgtatttataactatttatttctgggtggccactatcttccagccaaatccaacaatatctgtcaagtaaggagtgaaagctctttattggtttgcccgagggttggggatatccttttttttaaaaaattgccactttttattggatttttgtattttgaatttcaagtatttttctatatcaaatctagcaaaaaacggtgatgacggtttgtgatttataataaacactgacaatattcagattctggctaagcaaacagggtgatcaggcaattaacctgagtggcactggaggctgtgcagagccattctgtggagttttgtttctgaaatggcttttctggaattacggcctggagactggatggtctgtattgctctcagttcacagggtaggagagtggtcccgcccggctgtttccagttacagtccaagctaggaggaaatgctgatgggagcaggcacagcttgagcatgacacaggcctgtccccgtcctgaggcccagctagacctgggccttgccgacagctctgcttcctcctcctgtatctcctcctcctcccccttcctcttctgtctctactttctcctttttttttaagagaaaggagcagtagctgggaaggattttcttttttttacctttccgtctgatgctattctcctctcgtcagtcctggaaccctgaccagcatcacactgttgaatccttcaggttacacactgccttttaacctccaccctgcagtcagagcacggtggtgacacccctttgttgacaggcttgaccttcatgtcccttctgccctgccctgtgtcccatgggggaaatggcagagagtcccactgcatcacactgccctgttagcctcagcaacaagccctgggttccatgtcctctaagctctagataaaggtggttattccctgggcactgctggaagctgggaaggtcaccaccagaagggtcattgccagccttgtctcctccagtgaaaccagatcacagacatccatagtttctctgagagctggggcacacaaggaaaccagagcccagtatggattcttgtgttgctctagcagctgtggagattgagggatgtggtgaatgcaaagaacccagtttacttggcagtctcctgtgtaaatcacagtaaaacaaagtgaaatcgaaacaagaataaatttgatctcaaaatgaaaaaaaa

SEQ ID NO: 2138 - protein, 271 aa, Rattus norvegicus
  ref <308>: DATABASE ACCESSION NUMBER: Refseq / NP_446194
  ref <309>: DATABASE ENTRY DATE: 2003-01-13
MVLIKEFRVVLPCSVQEYQVGQLYSVAEASKNETGGGEGIEVLKNEPYENDGEKGQYTHKIYHLKSKVPAFVRMIAPEGSLVFHEKAWNAYPYCRTIVTNEYMKDDFFIKIETWHKPDLGTLENVHGLDPNTWKTVEIVHIDIADRSQVEPADYKADEDPALFQSVKTKRGPLGPNWKKELANTPDCPKMCAYKLVTIKFKWWGLQSKVENFIQKQEKRIFTNLHRQLFCWIDKWIDLTMEDIRRMEDETQKELETMRKKGSVRGTSAADA

SEQ ID NO: 2139 - DNA, 390 bp, Rattus norvegicus
  ref <308>: DATABASE ACCESSION NUMBER: EMBL / AA859878
  ref <309>: DATABASE ENTRY DATE: 2000-03-03
atctggggagggagggaattttgccagggaatgctggcacccccaacttgtagtgacagcatagctagggtatccccaggctgctcctaggctggtgtgtgcctcgtggaagccgtccatattcacacttccagctctgtgtccaccgtcatgcagtgtggggcagcggggaaaccacgtgggccctgggcagacaccaaactggtgctttcacatcctttgcaccctaccccccacatcatgatgatgtcactcacgaagccagtgctaaatactgagccaatgctttctgaaagaacatagtctgtggtgctgtggccttgcaatggacagtaaacacggttcttgccaaaactcctcctttgtcttggattaaatacttgacatttt

SEQ ID NO: 2140 - DNA, 5616 bp, Homo sapiens
  ref <308>: DATABASE ACCESSION NUMBER: Refseq / NM_020975
  ref <309>: DATABASE ENTRY DATE: 2003-01-15
gcttcagtcccgcgaccgaagcagggcgcgcagcagcgctgagtgccccggaacgtgcgtcgcgcccccagtgtccgtcgcgtccgccgcgccccgggcggggatggggcggccagactgagcgccgcacccgccatccagacccgccggccctagccgcagtccctccagccgtggccccagcgcgcacgggcgatggcgaaggcgacgtccggtgccgcggggctgcgtctgctgttgctgctgctgctgccgctgctaggcaaagtggcattgggcctctacttctcgagggatgcttactgggagaagctgtatgtggaccaggcagccggcacgcccttgctgtacgtccatgccctgcgggacgcccctgaggaggtgcccagcttccgcctgggccagcatctctacggcacgtaccgcacacggctgcatgagaacaactggatctgcatccaggaggacaccggcctcctctaccttaaccggagcctggaccatagctcctgggagaagctcagtgtccgcaaccgcggctttcccctgctcaccgtctacctcaaggtcttcctgtcacccacatcccttcgtgagggcgagtgccagtggccaggctgtgcccgcgtatacttctccttcttcaacacctcctttccagcctgcagctccctcaagccccgggagctctgcttcccagagacaaggccctccttccgcattcgggagaaccgacccccaggcaccttccaccagttccgcctgctgcctgtgcagttcttgtgccccaacatcagcgtggcctacaggctcctggagggtgagggtctgcccttccgctgcgccccggacagcctggaggtgagcacgcgctgggccctggaccgcgagcagcgggagaagtacgagctggtggccgtgtgcaccgtgcacgccggcgcgcgcgaggaggtggtgatggtgcccttcccggtgaccgtgtacgacgaggacgactcggcgcccaccttccccgcgggcgtcgacaccgccagcgccgtggtggagttcaagcggaaggaggacaccgtggtggccacgctgcgtgtcttcgatgcagacgtggtacctgcatcaggggagctggtgaggcggtacacaagcacgctgctccccggggacacctgggcccagcagaccttccgggtggaacactggcccaacgagacctcggtccaggccaacggcagcttcgtgcgggcgaccgtacatgactataggctggttctcaaccggaacctctccatctcggagaaccgcaccatgcagctggcggtgctggtcaatgactcagacttccagggcccaggagcgggcgtcctcttgctccacttcaacgtgtcggtgctgccggtcagcctgcacctgcccagtacctactccctctccgtgagcaggagggctcgccgatttgcccagatcgggaaagtctgtgtggaaaactgccaggcattcagtggcatcaacgtccagtacaagctgcattcctctggtgccaactgcagcacgctaggggtggtcacctcagccgaggacacctcggggatcctgtttgtgaatgacaccaaggccctgcggcggcccaagtgtgccgaacttcactacatggtggtggccaccgaccagcagacctctaggcaggcccaggcccagctgcttgtaacagtggaggggtcatatgtggccgaggaggcgggctgccccctgtcctgtgcagtcagcaagagacggctggagtgtgaggagtgtggcggcctgggctccccaacaggcaggtgtgagtggaggcaaggagatggcaaagggatcaccaggaacttctccacctgctctcccagcaccaagacctgccccgacggccactgcgatgttgtggagacccaagacatcaacatttgccctcaggactgcctccggggcagcattgttgggggacacgagcctggggagccccgggggattaaagctggctatggcacctgcaactgcttccctgaggaggagaagtgcttctgcgagcccgaagacatccaggatccactgtgcgacgagctgtgccgcacggtgatcgcagccgctgtcctcttctccttcatcgtctcggtgctgctgtctgccttctgcatccactgctaccacaagtttgcccacaagccacccatctcctcagctgagatgaccttccggaggcccgcccaggccttcccggtcagctactcctcttccggtgcccgccggccctcgctggactccatggagaaccaggtctccgtggatgccttcaagatcctggaggatccaaagtgggaattccctcggaagaacttggttcttggaaaaactctaggagaaggcgaatttggaaaagtggtcaaggcaacggccttccatctgaaaggcagagcagggtacaccacggtggccgtgaagatgctgaaagagaacgcctccccgagtgagctgcgagacctgctgtcagagttcaacgtcctgaagcaggtcaaccacccacatgtcatcaaattgtatggggcctgcagccaggatggcccgctcctcctcatcgtggagtacgccaaatacggctccctgcggggcttcctccgcgagagccgcaaagtggggcctggctacctgggcagtggaggcagccgcaactccagctccctggaccacccggatgagcgggccctcaccatgggcgacctcatctcatttgcctggcagatctcacaggggatgcagtatctggccgagatgaagctcgttcatcgggacttggcagccagaaacatcctggtagctgaggggcggaagatgaagatttcggatttcggcttgtcccgagatgtttatgaagaggattcctacgtgaagaggagccagggtcggattccagttaaatggatggcaattgaatccctttttgatcatatctacaccacgcaaagtgatgtatggtcttttggtgtcctgctgtgggagatcgtgaccctagggggaaacccctatcctgggattcctcctgagcggctcttcaaccttctgaagaccggccaccggatggagaggccagacaactgcagcgaggagatgtaccgcctgatgctgcaatgctggaagcaggagccggacaaaaggccggtgtttgcggacatcagcaaagacctggagaagatgatggttaagaggagagactacttggaccttgcggcgtccactccatctgactccctgatttatgacgacggcctctcagaggaggagacaccgctggtggactgtaataatgcccccctccctcgagccctcccttccacatggattgaaaacaaactctatggcatgtcagacccgaactggcctggagagagtcctgtaccactcacgagagctgatggcactaacactgggtttccaagatatccaaatgatagtgtatatgctaactggatgctttcaccctcagcggcaaaattaatggacacgtttgatagttaacatttctttgtgaaaggtaatggactcacaaggggaagaaacatgctgagaatggaaagtctaccggccctttctttgtgaacgtcacattggccgagccgtgttcagttcccaggtggcagactcgtttttggtagtttgttttaacttccaaggtggttttacttctgatagccggtgattttccctcctagcagacatgccacaccgggtaagagctctgagtcttagtggttaagcattcctttctcttcagtgcccagcagcacccagtgttggtctgtgtccatcagtgaccaccaacattctgtgttcacatgtgtgggtccaacacttactacctggtgtatgaaattggacctgaactgttggatttttctagttgccgccaaacaaggcaaaaaaatttaaacatgaagcacacacacaaaaaaggcagtaggaaaaatgctggccctgatgacctgtccttattcagaatgagagactgcggggggggcctgggggtagtgtcaatgcccctccagggctggaggggaagaggggccccgaggatgggcctgggctcagcattcgagatcttgagaatgattttttttaaatcatgcaacctttccttaggaagacatttggttttcatcatgattaagatgattcctagatttagcacaatggagagattccatgccatctttactatgtggatggtggtatcagggaagagggctcacaagacacatttgtcccccgggcccaccacatcatcctcacgtgttcggtactgagcagccactacccctgatgagaacagtatgaagaaagggggctgttggagtcccagaattgctgacagcagaggctttgctgctgtgaatcccacctgccaccagcctgcagcacaccccacagccaagtagaggcgaaagcagtggctcatcctacctgttaggagcaggtagggcttgtactcactttaatttgaatcttatcaacttactcataaagggacaggctagctagctgtgttagaagtagcaatgacaatgaccaaggactgctacacctctgattacaattctgatgtgaaaaagatggtgtttggctcttatagagcctgtgtgaaaggcccatggatcagctcttcctgtgtttgtaatttaatgctgctacaagatgtttctgtttcttagattctgaccatgactcataagcttcttgtcattcttcattgcttgtttgtggtcacagatgcacaacactcctccagtcttgtgggggcagcttttgggaagtctcagcagctcttctggctgtgttgtcagcactgtaacttcgcagaaaagagtcggattaccaaaacactgcctgctcttcagacttaaagcactgataggacttaaaatagtctcattcaaatactgtattttatataggcatttcacaaaaacagcaaaattgtggcattttgtgaggccaaggcttggatgcgtgtgtaatagagccttgtggtgtgtgcgcacacacccagagggagagtttgaaaaatgcttattggacacgtaacctggctctaatttgggctgtttttcagatacactgtgataagttcttttacaaatatctatagacatggtaaacttttggttttcagatatgcttaatgatagtcttactaaatgcagaaataagaataaactttctcaaattattaaaaatgcctacacagtaagtgtgaattgctgcaacaggtttgttctcaggagggtaagaactccaggtctaaacagctgacccagtgatggggaatttatccttgaccaatttatccttgaccaataacctaattgtctattcctgagttataaaagtccccatccttattagctctactggaattttcatacacgtaaatgcagaagttactaagtattaagtattactgagtattaagtagtaatctgtcagttattaaaatttgtaaaatctatttatgaaaggtcattaaaccagatcatgttcctttttttgtaatcaaggtgactaagaaaatcagttgtgtaaataaaatcatgtatc

SEQ ID NO: 2141 - protein, 1114 aa, Homo sapiens
  ref <308>: DATABASE ACCESSION NUMBER: Refseq / NP_066124
  ref <309>: DATABASE ENTRY DATE: 2003-01-15
MAKATSGAAGLRLLLLLLLPLLGKVALGLYFSRDAYWEKLYVDQAAGTPLLYVHALRDAPEEVPSFRLGQHLYGTYRTRLHENNWICIQEDTGLLYLNRSLDHSSWEKLSVRNRGFPLLTVYLKVFLSPTSLREGECQWPGCARVYFSFFNTSFPACSSLKPRELCFPETRPSFRIRENRPPGTFHQFRLLPVQFLCPNISVAYRLLEGEGLPFRCAPDSLEVSTRWALDREQREKYELVAVCTVHAGAREEVVMVPFPVTVYDEDDSAPTFPAGVDTASAVVEFKRKEDTVVATLRVFDADVVPASGELVRRYTSTLLPGDTWAQQTFRVEHWPNETSVQANGSFVRATVHDYRLVLNRNLSISENRTMQLAVLVNDSDFQGPGAGVLLLHFNVSVLPVSLHLPSTYSLSVSRRARRFAQIGKVCVENCQAFSGINVQYKLHSSGANCSTLGVVTSAEDTSGILFVNDTKALRRPKCAELHYMVVATDQQTSRQAQAQLLVTVEGSYVAEEAGCPLSCAVSKRRLECEECGGLGSPTGRCEWRQGDGKGITRNFSTCSPSTKTCPDGHCDVVETQDINICPQDCLRGSIVGGHEPGEPRGIKAGYGTCNCFPEEEKCFCEPEDIQDPLCDELCRTVIAAAVLFSFIVSVLLSAFCIHCYHKFAHKPPISSAEMTFRRPAQAFPVSYSSSGARRPSLDSMENQVSVDAFKILEDPKWEFPRKNLVLGKTLGEGEFGKVVKATAFHLKGRAGYTTVAVKMLKENASPSELRDLLSEFNVLKQVNHPHVIKLYGACSQDGPLLLIVEYAKYGSLRGFLRESRKVGPGYLGSGGSRNSSSLDHPDERALTMGDLISFAWQISQGMQYLAEMKLVHRDLAARNILVAEGRKMKISDFGLSRDVYEEDSYVKRSQGRIPVKWMAIESLFDHIYTTQSDVWSFGVLLWEIVTLGGNPYPGIPPERLFNLLKTGHRMERPDNCSEEMYRLMLQCWKQEPDKRPVFADISKDLEKMMVKRRDYLDLAASTPSDSLIYDDGLSEEETPLVDCNNAPLPRALPSTWIENKLYGMSDPNWPGESPVPLTRADGTNTGFPRYPNDSVYANWMLSPSAAKLMDTFDS

SEQ ID NO: 2142 - DNA, 2546 bp, Rattus norvegicus
  ref <308>: DATABASE ACCESSION NUMBER: Refseq / NM_030861
  ref <309>: DATABASE ENTRY DATE: 2003-01-13
ctccagggaagcaacagagagaagaaaagaaaggtacatggctacttcccactctcagcctagaagaataaacccttagattgcgggggaactgagccaggcaagccacaggcagccttgagcgcccccttgcctgccctcccctgcgggggccaggatgctgaagaagcagtctgcagggcttgtgctttggggtgctatcatctttgtgggctggaatgccctgctgctcctcttcttctggacacgcccagcacctggcaggctgccctcagacagtgcccttggtgatgaccctgccagcctcacccgtgaggtcatccacctggccgaggacgccgaggcggagttggagcggcagcggggactactgcagcagatcaaggagcattattctctgtggaggcagaggtggagagttcccaccgtggcccctccagcctggccccgtgtgcctgggaccccctcaccagctgtgatccccattctggtcattgcctgtgaccgcagcactgtccggcgctgcctggataagttgttgcactatcggccctctgctgagcatttccccattattgtcagtcaagactgtgggcatgaagagacagcacaggtcattgcttcttatggcaccgctgtcacacacatccggcagccagacctgagtaacattgccgtgcagccagaccaccgtaagttccagggttactacaagattgccaggcactaccgctgggcgctaggccagatcttcaacaagttcaagttcccggctgctgtggtagtggaggatgatctggaagtggcgccggacttcttcgagtacttccaggccacctacccgctgctgaaagcagacccctccctttggtgtgtgtcggcttggaatgataatggtaaggagcagatggtggactccagcaaacctgagctgctctatcgaacagacttttttcctggccttggatggctgctgttggctgatctctgggcagaactagagcccaagtggcccaaggccttctgggacgactggatgcgcagacctgagcagcggaaggggcgggcttgtattcgtccagaaatttcaagaactatgacatttggtcgcaagggtgtgagccatgggcagttctttgaccagcatcttaaattcatcaagctgaaccagcagttcgtgcccttcacccagttggacctgtcgtacctgcagcgggaggcctatgaccgggacttccttgcccaggtctatggtgccccccagctgcaggtggagaaagtgaggaccaatgatcggaaggaactgggggaggtgcgggtacagtacactagcagagacagctttaaggcctttgctaaggccctgggtgtcatggacgacctcaagtctggtgtccccagagctggctaccgtggcattgtcactttccagttccggggtcggcgtgtccacctggcacccccagagacatggaatggctatgatcctagctggaattagtggcacctgcctttccctcctgggtctccttgccgtatgatgagccgaggcagcctgcaggccctgggctataccattctgccagtgtttcctcttggatctatagatcttccctttttgtcctggccttcccccaagtggcattctagtgcacaaatcataagatgagggttatactcctcttgtcaagggagtactgtgtggtatgttcggggcatattgaacaagaaaccactgtgtggtgtggggagggttggacctgttggaccaggcttgtagtgtcctgagttctctccaagggcatctgcggagagcttggccactccagctctcctgaccaggcctctccaccctgatctggctcctgttagtacatgagcccactttatgtaccttccccactttctccaccttccccagggtggggccggattatggaagaaggaatagatttgtggccaactgagactaaccaaagggattcactgtcagagttagattgcatggccgggttgccggggtcactgcctcctggcttctcttcctgccgactttgccagtgctcttcttgtcctgcagtggagcagtgtgttgtgagatggaaagtaggagctaaagcaagacctctcccgtggtggagcagttgtcaggaacaatgacaggcggaaagcctacacttgggcacccctcttcttgcccatggccccccacttctgaaagttagttccctttgcattctttagggggattcagtggcagcctagtgggggacagtgggctccacgcctctttcccctggggttggtacagcctcctcccacagggcttgttcctggtggccatctcagcaaagtcaccagcagctgagaccaggacacctgtggcccttcctaagcattcccacatcttcccaggccgaggggcaggtggcaggctagagagaaagaaatttgtgtgttttgtttgttgcctgatcttagtttcatggaagaaaatggaatctacagaattattttcaaaaataaagtaaaggctgaattgtctg

SEQ ID NO: 2143 - protein, 447 aa, Rattus norvegicus
  ref <308>: DATABASE ACCESSION NUMBER: Refseq / NP_110488
  ref <309>: DATABASE ENTRY DATE: 2003-01-13
MLKKQSAGLVLWGAIIFVGWNALLLLFFWTRPAPGRLPSDSALGDDPASLTREVIHLAEDAEAELERQRGLLQQIKEHYSLWRQRWRVPTVAPPAWPRVPGTPSPAVIPILVIACDRSTVRRCLDKLLHYRPSAEHFPIIVSQDCGHEETAQVIASYGTAVTHIRQPDLSNIAVQPDHRKFQGYYKIARHYRWALGQIFNKFKFPAAVVVEDDLEVAPDFFEYFQATYPLLKADPSLWCVSAWNDNGKEQMVDSSKPELLYRTDFFPGLGWLLLADLWAELEPKWPKAFWDDWMRRPEQRKGRACIRPEISRTMTFGRKGVSHGQFFDQHLKFIKLNQQFVPFTQLDLSYLQREAYDRDFLAQVYGAPQLQVEKVRTNDRKELGEVRVQYTSRDSFKAFAKALGVMDDLKSGVPRAGYRGIVTFQFRGRRVHLAPPETWNGYDPSWN

SEQ ID NO: 2144 - DNA, 1049 bp, Rattus norvegicus
  ref <308>: DATABASE ACCESSION NUMBER: Refseq / NM_134449
  ref <309>: DATABASE ENTRY DATE: 2003-01-13
gccttcggttttagggagagcaggccgggcggtcagagatcatgggggagagcgcactggagcccgggcctgtgcccggggcgccggctgggggtccggtgcacgccgtcaccgtggtgactttgctggagaagctggccaccatgctagaggcgctgcgggagaggcaggggggcctggctgagaggcagggcggcctggcgggctcggtgcgccgcatccagagtggcctgggcgcgctgagtcgcagccacgacaccaccagcaacacactggcgcagctgctggccaaggcggagcgcgtgggctcccacgccgacgcagcccaggagcgggcagtgcaccgcgccgctcaggtgcagcgactggaggccaaccacgggttgctggtggcgcgcgggaagctgcacgtcctgctcttcaaggaggagactgaaattccagcccgcgccttccagaaagcaccagagctcttgggcccggaggaccagttggtgctaggcccagagcagccagaggatgaagttggagagagttctgatgaggaacccgtggagtcccgggctcagcggctgcgacgcactggcttacagaaggttcaaagcctgaaaagggctttttccagtcgtaaaggctctgaagcagcacagcccacgccagtcaagccgccacgcctaggtcctgtccggaactccgaaggcccggcagaaggccagcctgcagctcagcctgcaatggagcctgtgctcccgtctgccctggagccagaacctcctcagcctaccaaggaagatcctgagagacctgtgcttcaaatagagagcgcagcctgatccctggggctgcctgccccattcagcccttatgccttgtcccaaaaataaatactaatcgagtgcagcacttacatccaaataaggagagaatcctgcatccactgcccggctccaatccttccttcctggttttccagtctggtaccctgtgtcctctgaaagaggaacattcggccttgtttaggttcaccaccaataaaagtaattttctct

SEQ ID NO: 2145 - protein, 263 aa, Rattus norvegicus
  ref <308>: DATABASE ACCESSION NUMBER: Refseq / NP_604444
  ref <309>: DATABASE ENTRY DATE: 2003-01-13
MGESALEPGPVPGAPAGGPVHAVTVVTLLEKLATMLEALRERQGGLAERQGGLAGSVRRIQSGLGALSRSHDTTSNTLAQLLAKAERVGSHADAAQERAVHRAAQVQRLEANHGLLVARGKLHVLLFKEETEIPARAFQKAPELLGPEDQLVLGPEQPEDEVGESSDEEPVESRAQRLRRTGLQKVQSLKRAFSSRKGSEAAQPTPVKPPRLGPVRNSEGPAEGQPAAQPAMEPVLPSALEPEPPQPTKEDPERPVLQIESAA

SEQ ID NO: 2146 - DNA, 529 bp, Rattus norvegicus
  ref <308>: DATABASE ACCESSION NUMBER: EMBL / AA892308
  ref <309>: DATABASE ENTRY DATE: 1999-01-28
ctgacagctgacgtatgtgctctgaccccgcctccggttccatttttagtcaccattagataactgagctgcgggcagccatggagcactataccacagcaggactcaacagtggcaggctctttatggccagaaaaactggggtctgccttagctccgtctactgaatacaggaagttgggcccccagaagctgtggtgctgattggcatcagagcagtgggacacattcttgtttgcggcttgagattaaggccacatctttatgtggctttagctccagtccccagggaccattgatttaataccttggacaagcttctccaggcagtgacagactgcttgtcacagagggtagtggcaaggtggtggctgttggagggcagagctctctgctcactgagctagagcctcctcttctcaaaggccacctagccttcctccattctaatcatctgtgaagatttgtacggcttaagacaaaatacactttccataattgttgattttactttttgtccacaaccccc

SEQ ID NO: 2147 - DNA, 1803 bp, Rattus norvegicus; identical to SEQ ID NO: 1833
  ref <308>: DATABASE ACCESSION NUMBER: Refseq / NM_031620
  ref <309>: DATABASE ENTRY DATE: 2002-11-05

SEQ ID NO: 2148 - protein, 533 aa, Rattus norvegicus; identical to SEQ ID NO: 1834
  ref <308>: DATABASE ACCESSION NUMBER: Refseq / NP_113808
  ref <309>: DATABASE ENTRY DATE: 2002-11-05

SEQ ID NO: 2149 - DNA, 642 bp, Rattus norvegicus
  ref <308>: DATABASE ACCESSION NUMBER: Refseq / NM_017312
  ref <309>: DATABASE ENTRY DATE: 2003-01-14
atggaggtgctgcggcgctcttctgtcttcgctgcggagatcatggacgcctttgatcgctcgcccacagacaaggagctggtggcccaggctaaagcactaggccgggagtacgtgcacgcgcggcttttgcgcgccggcctctcctggagcgctccagagcgtgcctcgcctgcccctggaggacgcctggcagaggtgtgcaccgtgctgctgcgcttgggagatgagctggagcagatccgtcccagcgtatatcggaatgtggcccggcagctgcacatccccctgcagtctgagcctgtggtgactgatgccttcctcgctgtggccggccacatcttctcagcaggtatcacatggggcaaggtagtgtccctgtactcggtggctgcgggactagcggtggactgcgtccggcaagctcagccagccatggttcatgccctggttgactgcctgggggaatttgtacgcaagaccctggccacctggcttcggaggcgtggtggatggacggacgtcctcaagtgtgtggtcagcacagaccctggcttccgctcccactggctcgtggccacactctgcagctttggccgcttcctgaaggctgcattcttcctcctgttgccagagagatga

SEQ ID NO: 2150 - protein, 213 aa, Rattus norvegicus
  ref <308>: DATABASE ACCESSION NUMBER: Refseq / NP_059008
  ref <309>: DATABASE ENTRY DATE: 2003-01-14
MEVLRRSSVFAAEIMDAFDRSPTDKELVAQAKALGREYVHARLLRAGLSWSAPERASPAPGGRLAEVCTVLLRLGDELEQIRPSVYRNVARQLHIPLQSEPVVTDAFLAVAGHIFSAGITWGKVVSLYSVAAGLAVDCVRQAQPAMVHALVDCLGEFVRKTLATWLRRRGGWTDVLKCVVSTDPGFRSHWLVATLCSFGRFLKAAFFLLLPER

SEQ ID NO: 2151 - DNA, 2360 bp, Homo sapiens
  ref <308>: DATABASE ACCESSION NUMBER: Refseq / NM_032515
  ref <309>: DATABASE ENTRY DATE: 2003-01-15
gcgtcctcgcgggtctgaatggaagggtcgaggtcgtcgtcggcggcgagcagatcctgaagccagaactccaccccggcgcccgcgccatgcggcgggagaggtgcggcgccccccacccgcgtcgccgccatggaggtgctgcggcgctcctcggtcttcgccgccgagatcatggacgcctttgaccgctcgcccacagacaaggagctggtggcccaggccaaggcgctgggccgggagtacgtgcacgcgcggctgctgcgcgccggcctctcctggagcgcgcccgagcgtgccgcgccggtcccgggacgcctggctgaggtgtgcgcggtgctgctgcgcctgggcgatgagctggagatgatccggcccagcgtctaccgcaacgtggcgcgtcagctgcacatctccctgcagtctgagcctgtggtgaccgatgcgttcctggccgtggctggccacatcttctctgcaggcatcacgtggggcaaggtggtgtccctgtatgcggtggccgcggggctggccgtggactgtgtgaggcaggcccagcctgccatggtccacgccctcgtggactgcctgggggagttcgtgcgcaagaccctggcaacctggctgcggagacgcggcggatggactgatgtcctcaagtgtgtggtcagcacagaccctggcctccgctcccactggctggtggctgcactctgcagcttcggccgcttcctgaaggctgccttcttcgtgctgctgccagagagatgagctgcccacctggcagtggccgcagcctggccctctgggcccaacgcaggaggccctcagcacccgaacacatcttcctccgcagacccaggccctccggaaggggtgagtggggaggggctttcctgagcctggagctgggctttggggcagcctgcgaccctccccgcttgtgtcccttctcctgtgatctctgtgttttcccttttctttctggggccaggaagtcagggtcaactcccaggcctcagatgcaggggcccagaacacctgctctcacctgagccccaggtgaaggggcccgggaacacctgctctcacctgagccccaggtgaaggggcccgggaacacctgctctcacctgaaccccaggtgaaggggcccggaacacctgctctcacctgagccccaggtgaaggggcccggaacacctgctctcacctgagccccaggtgaaggggcccgggaacacctgctctcacctgagccccaggtgaaggggcccgggaacacctgctctcacctgaaccccaggtgaaggggcccggaacacctgctctcacctgagccccaggtgaaggggcccggaacacctgctctcacctgagccccaggtgaaggggcccgggaacacctgctctcacctgagcccctggtgaaggggcccggaacacttgctctcacctgagccccaggtgaaggggcccggaacacctgctctcacctgagccccaggtgaaggggcccggaacacctgctctcacctgagccccaggtgaaggggcccgggaacacctctcacctgaacccgggggtcccatcccaggaagaagggccatctcaggacatgagtcctcaggggccctgcacattcaatctgaaggtgaccctggcctggctgaagctggaagagctgtggggactcagcctgtaaacagagcgtaaggttcacatgctggttgcttaatccgtttctggaggaagagtatgacacccacttgtgatggggtccttgtgcggtggggaccggggccggcgggctccaggccagcacacctaacccatggatgtggaacctacggccgagaaggaatgttgcatgagtcggatcccagtccattgtcagtggagggtgagggtgaccccatctgctatttttgtgctcatcctcaaacaaccatttggggatgtgcctattagggctccgtaagaactcagatgcctgggaagcccagcccctcaggtgcccccacacacagccttcccttgacgcctacatttctaggcacatgtgaggcatctttcctggagccccgagccagccctgtccctccccagtgcagcatggcactcaggagatacaggctggacatggggcagtcgttctggggaggcctggcctagcagccacccacctgagccctcccggccaggcttcgtgctggggtgggccatgtgccaggacaggagggtcccggcggaaagccagccccggactcatcgtgacattgagatcccactggagggtaggggtggtaataaacttctccaaacgatcgttgtcattttaaaaaaaaaaaaaaaaaaa

SEQ ID NO: 2152 - protein, 212 aa, Homo sapiens
  ref <308>: DATABASE ACCESSION NUMBER: Refseq / NP_115904
  ref <309>: DATABASE ENTRY DATE: 2003-01-15
MEVLRRSSVFAAEIMDAFDRSPTDKELVAQAKALGREYVHARLLRAGLSWSAPERAAPVPGRLAEVCAVLLRLGDELEMIRPSVYRNVARQLHISLQSEPVVTDAFLAVAGHIFSAGITWGKVVSLYAVAAGLAVDCVRQAQPAMVHALVDCLGEFVRKTLATWLRRRGGWTDVLKCVVSTDPGLRSHWLVAALCSFGRFLKAAFFVLLPER

SEQ ID NO: 2153 - DNA, 1412 bp, Rattus norvegicus
  ref <308>: DATABASE ACCESSION NUMBER: Refseq / NM_013168
  ref <309>: DATABASE ENTRY DATE: 2003-01-14
tggtctctgcttctctggatcccgaaggagggcagaaggaagaaaacggctcaatgatgagggtgattcgagtgggcacccggaagagtcagctggctcgcatacagaccgacactgtggtagcgatgctgaaaaccttgtaccctggcatacagtttgaaatcattgctatgtccaccacaggggacaagattcttgatactgcactctctaagattggagagaagagcctgtttaccaaggagctagaaaacgccctggaaaaaaatgaagtggacctggttgttcactccctgaaggatgtgcctaccatactacctcctggctttaccattggagccatctgcaaacgggaaaacccttgtgatgctgttgtttttgagggaaagtttattggaaagaccctggaaaccttgccagagaaaagtgccgtggggaccagctccctgaggagagtggcgcagctacagagaaagttccctcacctggaattcaagagtattcggggaaacctcaacacccgcctacggaagctggatgagcagctggagttcagtgccattatcctggctgtggctggcctacagcgcatgggctggcagaaccgggtgggccagatcttgcacccagaggaatgcatgtatgctgtgggtcagggagccctggcggtggaggtccgagccaaggaccaggatatcttggacctagtgggtgtgttgcatgatcctgaaactctgcttcgctgcattgctgaaagggattttctgaggcacctggaaggaggctgtagcgtgccagtagcagtgcatacagtgatgaaggatgggcaactgtacctgactggtggagtctggagtctagatggctcagatagcatgcaagagaccatgcaggccaccatccaggtccctgttcagcaagaagatggtccagaggatgacccacagttggttggaatcactgcccggaacattccaagaggagcccagctagctgctgagaacctgggcatcagcctggcaagcttgttgctcaacaaaggagctaagaacatcctagatgttgcacggcagcttaatgatgtgcgctaactggcgacgtcggcacaggaaccgaaccccagctgtcactccagtgcctatgtctggctgtcaagtgccctgtgctccttaacaaggggaatgattatcccaggagattgaacagagttgttgagacttcggccttggaagatatgcctcaacttggggcctccatgactgcctttccctcagtagtttgtgggcttcatctctttagagaaagtccatgccaatcttttatgtaaccaatgccactaatcagttcagaatgtggttctcctggagttgggggaagatatgaataaacccaaagccctttaaccgtaaaaa

SEQ ID NO: 2154 - protein, 344 aa, Rattus norvegicus
  ref <308>: DATABASE ACCESSION NUMBER: Refseq / NP_037300
  ref <309>: DATABASE ENTRY DATE: 2003-01-14
MRVIRVGTRKSQLARIQTDTVVAMLKTLYPGIQFEIIAMSTTGDKILDTALSKIGEKSLFTKELENALEKNEVDLVVHSLKDVPTILPPGFTIGAICKRENPCDAVVFEGKFIGKTLETLPEKSAVGTSSLRRVAQLQRKFPHLEFKSIRGNLNTRLRKLDEQLEFSAIILAVAGLQRMGWQNRVGQILHPEECMYAVGQGALAVEVRAKDQDILDLVGVLHDPETLLRCIAERDFLRHLEGGCSVPVAVHTVMKDGQLYLTGGVWSLDGSDSMQETMQATIQVPVQQEDGPEDDPQLVGITARNIPRGAQLAAENLGISLASLLLNKGAKNILDVARQLNDVR

SEQ ID NO: 2155 - DNA, 1536 bp, Homo sapiens
  ref <308>: DATABASE ACCESSION NUMBER: Refseq / NM_000190
  ref <309>: DATABASE ENTRY DATE: 2002-11-05
gtgacgcgaggctctgcggagaccaggagtcagactgtaggacgacctcgggtcccacgtgtccccggtactcgccggccggagcccccggcttcccggggccgggggaccttagcggcacccacacacagcctactttccaagcggagccatgtctggtaacggcaatgcggctgcaacggcggaagaaaacagcccaaagatgagagtgattcgcgtgggtacccgcaagagccagcttgctcgcatacagacggacagtgtggtggcaacattgaaagcctcgtaccctggcctgcagtttgaaatcattgctatgtccaccacaggggacaagattcttgatactgcactctctaagattggagagaaaagcctgtttaccaaggagcttgaacatgccctggagaagaatgaagtggacctggttgttcactccttgaaggacctgcccactgtgcttcctcctggcttcaccatcggagccatctgcaagcgggaaaaccctcatgatgctgttgtctttcacccaaaatttgttgggaagaccctagaaaccctgccagagaagagtgtggtgggaaccagctccctgcgaagagcagcccagctgcagagaaagttcccgcatctggagttcaggagtattcggggaaacctcaacacccggcttcggaagctggacgagcagcaggagttcagtgccatcatcctggcaacagctggcctgcagcgcatgggctggcacaaccgggtggggcagatcctgcaccctgaggaatgcatgtatgctgtgggccagggggccttgggcgtggaagtgcgagccaaggaccaggacatcttggatctggtgggtgtgctgcacgatcccgagactctgcttcgctgcatcgctgaaagggccttcctgaggcacctggaaggaggctgcagtgtgccagtagccgtgcatacagctatgaaggatgggcaactgtacctgactggaggagtctggagtctagacggctcagatagcatacaagagaccatgcaggctaccatccatgtccctgcccagcatgaagatggccctgaggatgacccacagttggtaggcatcactgctcgtaacattccacgagggccccagttggctgcccagaacttgggcatcagcctggccaacttgttgctgagcaaaggagccaaaaacatcctggatgttgcacggcagcttaacgatgcccattaactggtttgtggggcacagatgcctgggttgctgctgtccagtgcctacatcccgggcctcagtgccccattctcactgctatctggggagtgattaccccgggagactgaactgcagggttcaagccttccagggatttgcctcaccttggggccttgatgactgccttgcctcctcagtatgtgggggcttcatctctttagagaagtccaagcaacagcctttgaatgtaaccaatcctactaataaaccagttctgaaggtaaaaaaaaaaaaaaaaaaaaaaaaaaaaaaaaaaa

SEQ ID NO: 2156 - protein, 361 aa, Homo sapiens [sequence omitted]

SEQ ID NO: 2157 - DNA, 537 bp, Rattus norvegicus
  ref <308>: DATABASE ACCESSION NUMBER: EMBL / AA892483
  ref <309>: DATABASE ENTRY DATE: 2000-03-03
accaccctgcttcctgtttacctcctggtcgctgaccacgtcagtgagtctgtgactcctggtcttgtcagatgcctcagctctcagtccaggcatagctggccctgttcacctcacttccgggtgctctttttgttctgtgttgctcttgtgaactgggtgtcctgcctgttgttacccagactcctgggtatggtggcgagggccagctcctgtaggttccagccacgtggtggtgtttctccgcagacagactggtttcttttccacataaatgtgatcttctctttaggttgactagcaagtgcttattcttggttaaaaaattagtaattgagtatttttctcatttttagtattaatcaaatattatattttaatacctttaattcatttaaaaatttttatgattaatcacacttttaggaaaaactattttggacaaccccaaatatgatgcatctatagcttgatatatatatagagagagatagcttatggtggactgtagtttatgctaattttactttcagtatt

SEQ ID NO: 2158 - DNA, 2004 bp, Homo sapiens
  ref <308>: DATABASE ACCESSION NUMBER: Refseq / XM_029942
  ref <309>: DATABASE ENTRY DATE: 2003-01-03
cccccttgtcattaatacattaaaaagattcaatctttaccctgaggtaattttggccagttggtaccggatttataccaaaataatggacttgattggtattcaaaccaagatatgttggacggttaccagaggagaaggactcagtcctattgaaagctgtgaaggattgggagatcctgcttgcttttatgttgctgtaatttttattttaaatggactaatgatggcattattcttcatatatggcacatatttaagtggcagccgattaggaggcctggttacagtgttgtgcttctttttcaatcatggagagtgtacccgtgtaatgtggacaccacctctccgtgaaagcttctcatatccatttcttgttcttcagatgttgctagtgactcatattctcagggctacaaaactttatagaggaagcttgattgcactctgcatttccaatgtatttttcatgcttccttggcagtttgctcagtttgtacttcttactcagattgcatcattatttgcagtatatgttgtcgggtacattgatatatgtaaattacggaagatcatttatatacacatgatttctcttgcactttgttttgttttgatgtttgggaactcaatgttattaacttcttattatgcttcttctttggtaattatttggggtattctggcaatgaaaccacatttcctgaaaataaatgtatctgaacttagtttatgggttattcaaggatgtttttggttatttggaactgtcatacttaaatacttgacatctaaaatttttggtattgcagatgacgctcatattggcaacttactaacatcaaaattctttagttataaggattttgatactttattgtatacctgtgcagcggagtttgactttatggaaaaagagactccactgagatacacaaagacattattgcttccagttgttcttgtagtgtttgttgctattgttagaaagattattagtgatatgtggggtgtcttagctaaacaacagacacatgtaagaaaacaccagtttgatcatggagagctggtttaccatgcattgcaattgttagcatatacagcccttggtattttaattatgagactaaaactcttcttgacaccacacatgtgtgttatggcatcactgatctgctcaagacagctatttggatggctcttttgcaaagtacatcctggtgctattgtgtttgctatattagcagcaatgtcaatacaaggttcagcaaatctgcaaacccagtggaatattgtaggggagttcagcaatttgccccaagaagaacttatagaatggatcaaatatagtactaaaccagatgcagtgtttgcgggtgccatgcccacgatggcaagtgttaagctctctgcacttcggcccattgtgaatcatccacattatgaagacgcaggcttgagagccagaacaaaaatagtatactcaatgtatagtcggaaagcagccgaagaagtgaagcgagaactgataaagttaaaagtgaactattacattctagaagagtcatggtgtgtaagaagatccaagcctggttgcagtatgcctgaaatttgggatgtagaagatcctgccaatgctgggaaaactcccttatgtaacctcttggtgaaggattccaaacctcacttcaccactgtattccagaacagtgtttacaaagtcctagaagttgtaaaagaatgactgctacatgacctgctgcctacggagaactacatctatgactagacattcactttgcaaataattgttgtgactctatgtttgctccagacacagagcttttattgtcacccaaagatgcctatgggaaccaaaagaatcaagctgaaccaagatttctgccagaatcaatttcctcaagccagaaggctttatcattcagtctgtgcaacggatttttttttaaataaaaacagacttctttgttgatttctcccttt

SEQ ID NO: 2159 - protein, 552 aa, Homo sapiens
  ref <308>: DATABASE ACCESSION NUMBER: Refseq / XP_029942
  ref <309>: DATABASE ENTRY DATE: 2003-01-03
MDLIGIQTKICWTVTRGEGLSPIESCEGLGDPACFYVAVIFILNGLMMALFFIYGTYLSGSRLGGLVTVLCFFFNHGECTRVMWTPPLRESFSYPFLVLQMLLVTHILRATKLYRGSLIALCISNVFFMLPWQFAQFVLLTQIASLFAVYVVGYIDICKLRKIIYIHMISLALCFVLMFGNSMLLTSYYASSLVIIWGILAMKPHFLKINVSELSLWVIQGCFWLFGTVILKYLTSKIFGIADDAHIGNLLTSKFFSYKDFDTLLYTCAAEFDFMEKETPLRYTKTLLLPVVLVVFVAIVRKIISDMWGVLAKQQTHVRKHQFDHGELVYHALQLLAYTALGILIMRLKLFLTPHMCVMASLICSRQLFGWLFCKVHPGAIVFAILAAMSIQGSANLQTQWNIVGEFSNLPQEELIEWIKYSTKPDAVFAGAMPTMASVKLSALRPIVNHPHYEDAGLRARTKIVYSMYSRKAAEEVKRELIKLKVNYYILEESWCVRRSKPGCSMPEIWDVEDPANAGKTPLCNLLVKDSKPHFTTVFQNSVYKVLEVVKE

SEQ ID NO: 2160 - DNA, 1618 bp, Rattus norvegicus
  ref <308>: DATABASE ACCESSION NUMBER: Refseq / NM_017275
  ref <309>: DATABASE ENTRY DATE: 2003-01-14
aaggcatcttacgtccgcagcccaccaccctcacacacacctgtgacgcccggcgcgcccccctgcccgcacgcgcacagcccacgcagctctggacacaggcggctgaggttgcggagtccccccacgctgaggcgccaggggccaagcagcgattagggggctgcgtgggtggctgtggtcgtgacaggtggctgcaagcagggtcgcagacatgctgctgctcaagaaacagacggaggacatcagcagtgtctatgagatccgggagaagctgggctcgggtgccttctctgaggtgatgctggcccaggaaaggggctctgctcatcttgtggccctcaagtgcattcccaagaaagcacttcggggcaaggaggccctggtggagaatgagatcgcagtactccgcaggattagccaccccaacattgtggctctggaggacgtccacgagagcccttcccatctctacttggccatggagctggtaacaggtggtgaactgtttgaccgaatcatggagcggggctcctacacagagaaggatgcgagccaccttgtagggcaggtccttggtgctgtctcctaccttcatagcctgggcatcgtgcaccgggacctcaagcctgaaaacctcctctatgccacaccttttgaggactccaagatcatggtctctgactttggcctgtccaaaattcaagctggcaacatgctaggcacagcctgtgggaccccaggatatgtggccccagagctcctggagcagaaaccctacgggaaggccgtagatgtgtgggccctgggtgtcatctcctacatcctgctgtgtgggtacccccccttctatgatgagagcgatcctgaactcttcagccagattctgagggccagctacgagtttgactctcccttttgggatgacatctcagaatcagccaaagacttcattcggcaccttctggaacgtgatccccagaagaggttcacctgccaacaggccttacagcatctctggatctctggggatgcagccttggacagggacatcctaggttctgtcagtgagcagatccagaagaattttgccaggacccactggaagcgtgcattcaatgccacatcattcctacgtcacatccgtaagctgggacagagcccagagggtgaggaggcctccaggcagggtatgacccgtcacagccacccaggccttgggactagccagtctcccaagtggtgacaaccaggtggatgccaaggaaggccaagtggactgactcctagcttttctttcctccagcccttttgatctccttccctgatccttgtcccccggactggcctctgttggaaagtccaagaccgtgggtgtgatgcatggcactggggtatggggcttcccaagtatgtccccagcctctgtcctttgttgctgccaccctctatggaaactgaggaggtattcaaaaatggatttggggccatccttcctgcaccttgcacgcacatatgcattgcgtggctgttctgtgctttgctgactgtgggtggtcctgcttgtgttgtagccctttagttcctcctctttccaaccaataaagacaaacagaac

SEQ ID NO: 2161 - protein, 343 aa, Rattus norvegicus
  ref <308>: DATABASE ACCESSION NUMBER: Refseq / NP_058971
  ref <309>: DATABASE ENTRY DATE: 2003-01-14
MLLLKKQTEDISSVYEIREKLGSGAFSEVMLAQERGSAHLVALKCIPKKALRGKEALVENEIAVLRRISHPNIVALEDVHESPSHLYLAMELVTGGELFDRIMERGSYTEKDASHLVGQVLGAVSYLHSLGIVHRDLKPENLLYATPFEDSKIMVSDFGLSKIQAGNMLGTACGTPGYVAPELLEQKPYGKAVDVWALGVISYILLCGYPPFYDESDPELFSQILRASYEFDSPFWDDISESAKDFIRHLLERDPQKRFTCQQALQHLWISGDAALDRDILGSVSEQIQKNFARTHWKRAFNATSFLRHIRKLGQSPEGEEASRQGMTRHSHPGLGTSQSPKW

SEQ ID NO: 2162 - DNA, 706 bp, Homo sapiens
  ref <308>: DATABASE ACCESSION NUMBER: EMBL / BI668490
  ref <309>: DATABASE ENTRY DATE: 2001-09-13
agcgggggggctggcgctgcggccactgcgcggcacgacgctgcggcacccgctccagacatgctgctgctgaagaaacacacggaggacatcagcagcgtctacgagatccgcgagaggctcggctcgggtgccttctccgaggtggtgctggcccaggagcggggctccgcacacctcgtggccctcaagtgcatccccaagaaggccctccggggcaaggaggccctggtggagaacgagatcgcagtgctccgtaggatcagtcaccccaacatcgtcgctctggaggatgtccacgagagcccttcccacctctacctggccatggaactggtgacgggtggcgagctgtttgaccgcatcatggagcgcggctcctacacagagaaggatgccagccatctggtgggtcaggtccttggcgccgtctcctacctgcacagcctggggatcgtgcaccgggacctcaagcccgaaaacctcctgtatgccacgccctttgaggactcgaagatcatggtctctgactttggactctccaaaatccaggctgggaacatgctaggcaccgcctgtgggacccctggatatgtggccccagagctcttggagcagaaaccctacgggaaggccgtagatgtgtgggccctgggcgtcatctcctacatcctgctgtgtgggtacccccccttctacgacgaga

SEQ ID NO: 2163 - DNA, 3442 bp, Rattus norvegicus; identical to SEQ ID NO: 188
  ref <308>: DATABASE ACCESSION NUMBER: Refseq / NM_012720
  ref <309>: DATABASE ENTRY DATE: 2003-01-14

SEQ ID NO: 2164 - protein, 81 aa, Rattus norvegicus; identical to SEQ ID NO: 189
  ref <308>: DATABASE ACCESSION NUMBER: Refseq / NP_036852
  ref <309>: DATABASE ENTRY DATE: 2003-01-14

SEQ ID NO: 2165 - DNA, 915 bp, Homo sapiens; identical to SEQ ID NO: 190
  ref <308>: DATABASE ACCESSION NUMBER: Refseq / NM_006501
  ref <309>: DATABASE ENTRY DATE: 2002-02-10

SEQ ID NO: 2166 - protein, 182 aa, Homo sapiens; identical to SEQ ID NO: 191
  ref <308>: DATABASE ACCESSION NUMBER: Refseq / NP_006492
  ref <309>: DATABASE ENTRY DATE: 2002-02-10

SEQ ID NO: 2167 - DNA, 3442 bp, Rattus norvegicus; identical to SEQ ID NO: 188
  ref <308>: DATABASE ACCESSION NUMBER: Refseq / NM_012720
  ref <309>: DATABASE ENTRY DATE: 2003-01-14

SEQ ID NO: 2168 - protein, 81 aa, Rattus norvegicus; identical to SEQ ID NO: 189
  ref <308>: DATABASE ACCESSION NUMBER: Refseq / NP_036852
  ref <309>: DATABASE ENTRY DATE: 2003-01-14

SEQ ID NO: 2169 - DNA, 915 bp, Homo sapiens; identical to SEQ ID NO: 190
  ref <308>: DATABASE ACCESSION NUMBER: Refseq / NM_006501
  ref <309>: DATABASE ENTRY DATE: 2002-02-10

SEQ ID NO: 2170 - protein, 182 aa, Homo sapiens; identical to SEQ ID NO: 191
  ref <308>: DATABASE ACCESSION NUMBER: Refseq / NP_006492
  ref <309>: DATABASE ENTRY DATE: 2002-02-10

SEQ ID NO: 2171 - DNA, 3442 bp, Rattus norvegicus; identical to SEQ ID NO: 188
  ref <308>: DATABASE ACCESSION NUMBER: Refseq / NM_012720
  ref <309>: DATABASE ENTRY DATE: 2003-01-14

SEQ ID NO: 2172 - protein, 81 aa, Rattus norvegicus; identical to SEQ ID NO: 189
  ref <308>: DATABASE ACCESSION NUMBER: Refseq / NP_036852
  ref <309>: DATABASE ENTRY DATE: 2003-01-14

SEQ ID NO: 2173 - DNA, 915 bp, Homo sapiens; identical to SEQ ID NO: 190
  ref <308>: DATABASE ACCESSION NUMBER: Refseq / NM_006501
  ref <309>: DATABASE ENTRY DATE: 2002-02-10

SEQ ID NO: 2174 - protein, 182 aa, Homo sapiens; identical to SEQ ID NO: 191
  ref <308>: DATABASE ACCESSION NUMBER: Refseq / NP_006492
  ref <309>: DATABASE ENTRY DATE: 2002-02-10

SEQ ID NO: 2175 - DNA, 376 bp, Rattus norvegicus
  misc_feature (1)..(376): n=a, c, g or t
  ref <308>: DATABASE ACCESSION NUMBER: EMBL / H33093
  ref <309>: DATABASE ENTRY DATE: 2000-03-04
tgaacagttagccgatcaggcctatttgcaggaagtgaaagactgaagggctatatcttgccctcaacccagtctcctttctgtcatgagggaagcactcttctttgccaagtgtttctttctatgatgttcagttttgcctcaggccaaagaaccatgaaccaaagccatgaaccaaaataaatcntcactcatttcagttgtatcaagtgttttgtcccaacagnggatactaacactcatgggtaatggcttttgtctatatgtatgtatgtttgtaaaagtgaatattatatatctatatgcatactgtgtgctcacaatatcatatacattgtaccatattgagttagaaataaacacttgtttatcaaag

SEQ ID NO: 2176 - DNA, 574 bp, Rattus norvegicus; identical to SEQ ID NO: 2057
  ref <308>: DATABASE ACCESSION NUMBER: EMBL / AI228548
  ref <309>: DATABASE ENTRY DATE: 1998-11-02

SEQ ID NO: 2177 - DNA, 3216 bp, Rattus norvegicus; identical to SEQ ID NO: 2116
  ref <308>: DATABASE ACCESSION NUMBER: Refseq / NM_057104
  ref <309>: DATABASE ENTRY DATE: 2003-01-13

SEQ ID NO: 2178 - protein, 885 aa, Rattus norvegicus; identical to SEQ ID NO: 2117
  ref <308>: DATABASE ACCESSION NUMBER: Refseq / NP_476445
  ref <309>: DATABASE ENTRY DATE: 2003-01-13

SEQ ID NO: 2179 - DNA, 3231 bp, Homo sapiens; identical to SEQ ID NO: 2118
  ref <308>: DATABASE ACCESSION NUMBER: Refseq / NM_006209
  ref <309>: DATABASE ENTRY DATE: 2002-04-08

SEQ ID NO: 2180 - protein, 915 aa, Homo sapiens; identical to SEQ ID NO: 2119
  ref <308>: DATABASE ACCESSION NUMBER: Refseq / NP_006200
  ref <309>: DATABASE ENTRY DATE: 2002-04-08

SEQ ID NO: 2181 - DNA, 611 bp, Rattus norvegicus
  ref <308>: DATABASE ACCESSION NUMBER: EMBL / AA892391
  ref <309>: DATABASE ENTRY DATE: 2000-03-03
tcgttttgctgccctgaaccggcttgtgggaagtccttcaactttaaaaagcacctgaaggagcatgtgaaactacacagcgatgccagggactacatctgtgaattctgtgcccgatctttccgcactagcagcaaccttgtcatccacagacggatccacacgggagagaagcccctgcagtgtgagatatgtggatttacttgccgccagaaggcctccctaaactggcaccgacgcaagcatgcagagactgcagctgccctgcgcttcccctgtgaattctgtggcaagcgcttcgagaagccagacagtgtggtagctcactgtagcaaaagccacccagccatgctcccagtacaggagtcacctggctctctggggtctagtcccagcatttctgcccctgaacccctgcaatctcccgaggggactagcttctctacctcttatgactctaatcctgccccctcaacatccatctcttcacctggggtgccagcccccaggaacacagagaaaagttaggtggtagttcccagggactaggatatttgagtgcatttgagggtagggcatcactgggctccagataccaggctttagccttt

SEQ ID NO: 2182 - DNA, 1986 bp, Homo sapiens
  ref <308>: DATABASE ACCESSION NUMBER: Refseq / NM_017865
  ref <309>: DATABASE ENTRY DATE: 2002-11-05
agcagccgacgccgagaggcaccgtttcttcttaaaagagaaacgctgcgcgcgcgaggtgggcccctgtcttccagcagctccgggcctgctcgctaggcccgggaggcgcaggcgcaggcgcagtgggggtgagggcgcgtgggggcgcacagcctctggtgcacatggcttcctccccggcggtggacgtgtcctgcaggcggcgggagaagcggcggcagctggacgcgcgccgcagcaagtgccgcatccgcctgggcggccacatggagcagtggtgcctcctcaaggagcggctgggcttctccctgcactcgcagctcgccaagttcctgttggaccggtacacttcttcaggctgtgtcctctgtgcaggtcctgagcctttgcctccaaaaggtctgcagtatctggtgctcttgtctcatgcccacagccgagagtgcagcctggtgcccgggcttcgggggcctggcggccaagatggggggcttgtgtgggagtgctcagcaggccataccttctcctggggaccctctttgagccctacaccttcagaggcacccaagccagcctcccttccacatactactcggagaagttggtgttccgaggccacgagtgggcaggagcttgcagatttggaatctgagcatgatgagaggactcaagaggccaggttgcccaggagggtgggacccccaccagagaccttcccacctccaggagaggaagagggtgaggaagaagaggacaatgatgaggatgaagaggagatgctcagtgatgccagcttatggacctacagctcctccccagatgatagtgagcctgatgcccccagactactgccttcccctgtcacctgcacacctaaagagggggagacaccaccagcccctgcagcactctccagtcctcttgctgtgccggccttgtcagcatcctcattgagttccagagctcctccacctgcagaagtcagggtgcagccacagctcagcaggacccctcaagcggcccagcagactgaggccctggccagcactgggagtcaggcccagtctgctccaaccccggcctgggatgaggacactgcacaaattggccccaagagaattaggaaagctgccaaaagagagctgatgccttgtgacttccctggctgtggaaggatcttctccaaccggcagtatttgaatcaccacaaaaagtaccagcacatccaccagaagtctttctcctgcccagagccagcctgtgggaagtctttcaactttaagaaacacctgaaggagcacatgaagctgcacagtgacacccgggactacatctgtgagttctgcgcccggtctttccgcactagcagcaaccttgtcatccacagacgtatccacactggagaaaaacccctgcagtgtgagatatgcgggtttacctgccgccagaaggcttccctgaactggcaccagcgcaagcatgcagagacggtggctgccttgcgcttcccctgtgaattctgcggcaagcgctttgagaagccagacagtgttgcagcccaccgtagcaaaagtcacccagccctgcttctagcccctcaagagtcacccagtggtcccctagagccctgtcccagcatctctgcccctgggcctctgggatccagcgaggggtccaggccctctgcatctcctcaggctccaaccctgcttcctcagcaatgagctctcctccagctttggctttgggaagccagactccagggactgaaaaggagcaacaaggagagggtctgcttgagaaatgccagatgcttggtccccaggaactaaggcgacagagtgcagggtgggggcaagactgggctgtaggggagctggactactttagtcttcctaaaggacaaaataaacagtattttatgcaggaaaaaaaaaaaaaaaaaaaaaaaaaaaaaaaaaaaaaaaaaaaaaaaaaaaaaaa

SEQ ID NO: 2183 - protein, 519 aa, Homo sapiens
  ref <308>: DATABASE ACCESSION NUMBER: Refseq / NP_060335
  ref <309>: DATABASE ENTRY DATE: 2002-11-05
MASSPAVDVSCRRREKRRQLDARRSKCRIRLGGHMEQWCLLKERLGFSLHSQLAKFLLDRYTSSGCVLCAGPEPLPPKGLQYLVLLSHAHSRECSLVPGLRGPGGQDGGLVWECSAGHTFSWGPSLSPTPSEAPKPASLPHTTRRSWCSEATSGQELADLESEHDERTQEARLPRRVGPPPETFPPPGEEEGEEEEDNDEDEEEMLSDASLWTYSSSPDDSEPDAPRLLPSPVTCTPKEGETPPAPAALSSPLAVPALSASSLSSRAPPPAEVRVQPQLSRTPQAAQQTEALASTGSQAQSAPTPAWDEDTAQIGPKRIRKAAKRELMPCDFPGCGRIFSNRQYLNHHKKYQHIHQKSFSCPEPACGKSFNFKKHLKEHMKLHSDTRDYICEFCARSFRTSSNLVIHRRIHTGEKPLQCEICGFTCRQKASLNWHQRKHAETVAALRFPCEFCGKRFEKPDSVAAHRSKSHPALLLAPQESPSGPLEPCPSISAPGPLGSSEGSRPSASPQAPTLLPQQ

SEQ ID NO: 2184 - DNA, 3864 bp, Rattus norvegicus
  ref <308>: DATABASE ACCESSION NUMBER: Refseq / NM_019225
  ref <309>: DATABASE ENTRY DATE: 2003-01-13
gcccctccgctcgccgctcgctgagctgttactccgagctacctgctggggaaattcacttcgacgtagcctggggtgtcttccaccagtcacagaatcagaaaagttgtcctctctaacaccaaagaggagatttcgctttctggggacaagttcaagacactgaagtgcaaggctgtggtaaattcctggaaagataaaatatgacaaaaagcaacggagaagagcccaggatgggaagcaggatggaaagattccagcaaggggtgcgcaagcggacgctcctggccaagaagaaagttcagaacatcaccaaggaggatgtgaagagctacctgtttcggaatgcctttgtgctactcaccgtcagcgctgtcattgtgggtacaatccttggatttgccctccgaccgtataaaatgagctaccgggaggtcaagtacttctcctttcctggggagcttctgatgcggatgctgcagatgttggtcttacccctgatcatctccagtcttgtcacaggaatggcggccctagatagtaaggcatctgggaagatggggatgcgagctgtggtctattacatgactaccaccatcattgctgtggtgatcggcataatcattgtcatcatcatccaccccggaaagggcacgaaagaaaacatgtacagagaaggtaaaatcgtgcaggtgactgccgcagatgccttcctggatttaatcaggaacatgttcccacccaatctggtagaagcctgctttaaacagtttaaaaccagctatgagaagagaagctttaaagtgcccatccaggccaacgaaacactgttgggcgccgtgatcaacaacgtgtcagaggccatggagactctgacccggatccgggaggagatggtacccgttcctgggtctgtgaatggggtcaatgccctgggcctcgttgtcttctccatgtgcttcggcttcgtgatcggaaacatgaaggagcaggggcaagcgctaagagagttcttcgactctctcaatgaagccatcatgagattggtagcggtgataatgtggtatgcacctctgggcatcctcttcttgatcgcagggaagattgttgagatggaagatatgggtgtgattggggggcagcttgccatgtatacagtgacagtcatcgtcggcctcctcattcatgccgtcatcgtcctgcctctcctctacttcctggtaacccggaagaacccctgggttttcattggagggttgctgcaagcactcatcacagccctggggacctcctcaagttctgccaccctgcccatcactttcaagtgcctggaagaaaacaatggtgtggacaaacgcatcaccagatttgtgcttcccgtgggggccaccattaacatggatgggaccgccctctacgaggctttggccgccattttcatcgctcaagttaacaactttgacctgaattttggacagattataacaataagtatcacagccacagccgcaagcattggggcagctggcattcctcaggccggtctagtcaccatggtcatcgtgctgacatctgtgggcctgcccacggatgacatcacactcatcattgcagtggactggtttctggaccgcctccgaaccaccaccaacgtgctgggtgactccctcggggccgggattgttgaacacttgtcccgacatgaactgaagaaccgagatgttgaaatggggaactccgtgattgaggagaatgaaatgaaaaagccgtatcagctgattgcccaggacaatgaaccagagaaacccgtggcagacagcgaaaccaagatgtagactaacacagaagtgctttcttaagcaccaggtgttggaaactgttctacaatgtgtccatctcccagagctctctctcccagtgagctcctctttcctccctactctgataggattggaaaatgtccaaaaacaaaggagggctctgcagcagccaaaacgtattggttttagccctcatttgaaaattttaaatcatttcgtattattcttaccaagtaagttactacaaacattaccaatttagatgacaaatgatcccttgtgattgttttgtaagtaaaagcattaagcaaatgataggctacaaaaacattttaaaaccaactttcaaaatgtaaaaatccttcagaacactactgagttttagtcttaaaacatagcaacttgatgagcaattatcagttacccgttgggtagctgagaggtttgccctttcttctgactctcatcctgactttatcagcatcagggcaatgcccacatgcacacagcacagccgtgaggtggagcagaaagtgaggctccccaatggtcttgagtgagccttgtctcatccctgggcctcagtgttctcatgcagaaaatgagtgacccctagataccataggcctctctagcccagacttttacaacatcaggaaggaccctgcccctgtataacatgaggatttcagacaggacacttaatgggagtggacatttctctctaggggcaggctgcgtgtggctcactagatcctgggtccagaatgtgggttatataagtagacaggtggaaggccatcccgggagaccatccccttggcctgttgttctgttttatcttgttttgttttccaacattaaaagaagcactcccttcttgggtactcttcccaaacccaagggaagaaagcctcccaccacctcttcgactgacagtgagatgtttaggaaacaaggagaagactagcagctagcaagtgtgtccatggtcttactacggaacacaaaagagcagaggcggaatagagtacagcccacattacaaaggaggattctttttaagatcagaaaaagttggttttctttaaagactaaaagagagctgaaccttggccttcttctgctggcctaaacgctttgtcttctgttcctaatcaatccccaaagaaacaacacataacatcactcctttcttatttcacagtccagcaaatgatatctctggaacagattcatatctataagctgggtggatggtctcatttccaaaaaaaaaagtttaaaatttggttagtttttcctattttaactggaagttcttaggatgacaaaaccacatactcctttgtacagagatgtctcttgacaaatcattcaagactctcatctagaatggagtttgcttgtgtccctgtctccccctccctaaatgcagatgaatcagcatgaaaataacatcaacgagggtggaagaaaagagggcaaaggaattgttttcaggcgaggcagctcccaggttgaaaagagatttttttacttccttaggaatatccaatcaaagatactcaatgggagccctctgacagtaccagctgtgtttctttctgagagaaaatgctgagtggacaccattatgctaacagactgaaggtctagactccttgtgtctcccgatctactgtagagatactttctagagattctgagcgttacatgcgtataaaggttaacactaggctacagtggaatagtcatttaatggcaggctcaatttgggaagtacactacagaggttaacctatgtggcagtcgttttgcgacgctagtagaacaaacttaaccgcgtcaaattaacgctgtttacccagtgtgatcatattttttatactaaccgtttcttacgaaaactggtcctctagggtgatcctttagccagcccatcacaggctgcgcagatgtgtgtacccactgtggactgggaaacatcactttgtagatgtattttcaataaagaaaagatagttttacatgaaaaaaaaaa

SEQ ID NO: 2185 - protein, 543 aa, Rattus norvegicus
  ref <308>: DATABASE ACCESSION NUMBER: Refseq / NP_062098
  ref <309>: DATABASE ENTRY DATE: 2003-01-13
MTKSNGEEPRMGSRMERFQQGVRKRTLLAKKKVQNITKEDVKSYLFRNAFVLLTVSAVIVGTILGFALRPYKMSYREVKYFSFPGELLMRMLQMLVLPLIISSLVTGMAALDSKASGKMGMRAVVYYMTTTIIAVVIGIIIVIIIHPGKGTKENMYREGKIVQVTAADAFLDLIRNMFPPNLVEACFKQFKTSYEKRSFKVPIQANETLLGAVINNVSEAMETLTRIREEMVPVPGSVNGVNALGLVVFSMCFGFVIGNMKEQGQALREFFDSLNEAIMRLVAVIMWYAPLGILFLIAGKIVEMEDMGVIGGQLAMYTVTVIVGLLIHAVIVLPLLYFLVTRKNPWVFIGGLLQALITALGTSSSSATLPITFKCLEENNGVDKRITRFVLPVGATINMDGTALYEALAAIFIAQVNNFDLNFGQIITISITATAASIGAAGIPQAGLVTMVIVLTSVGLPTDDITLIIAVDWFLDRLRTTTNVLGDSLGAGIVEHLSRHELKNRDVEMGNSVIEENEMKKPYQLIAQDNEPEKPVADSETKM

SEQ ID NO: 2186 - DNA, 727 bp, Rattus norvegicus
  ref <308>: DATABASE ACCESSION NUMBER: Refseq / NM_019162
  ref <309>: DATABASE ENTRY DATE: 2003-01-15
agctgggactggttcctgccacctccccgagcccctgcactcttgtctctctctgtctccacagcagcgtcaccggctcccggatcctgccagccgtccagctctacaggcaccatgaggagcgccatgctgttcgcggctgtcctcgccctcagcttggcatggaccttcggggctgcgtgtgaggaacctcaggagcagggtgggaggctcagtaaggactctgatctctctctgctacctccacccctgcttcggagactctacgacagccgctccatctctctggaaggattgctgaaagtgctgagcaaggctagcgtgggaccgaaggagacatcacttccacagaaacgtgacatgcacgacttctttgtgggacttatgggcaagaggaacagccaaccagacactcccgctgatgtggttgaagagaacacccccagctttggcgtcctcaaataggccagcagtgcagaaaagcactccactctcagaccctggactgcatcataaagacagggttcctgtggcggtcccagtgcctgcgctcctgcttccctgcctgcaaggtcctcctgttggctcccttccctactctgcacagatgctgcatatgaacagcctctacccccatatcaattatggtttctgtagtgtcctgcattaaaaataccatgtctcctcctcaacaataaagggtttttacaatggagtgactgaaaag

SEQ ID NO: 2187 - protein, 116 aa, Rattus norvegicus
  ref <308>: DATABASE ACCESSION NUMBER: Refseq / NP_062035
  ref <309>: DATABASE ENTRY DATE: 2003-01-15
MRSAMLFAAVLALSLAWTFGAACEEPQEQGGRLSKDSDLSLLPPPLLRRLYDSRSISLEGLLKVLSKASVGPKETSLPQKRDMHDFFVGLMGKRNSQPDTPADVVEENTPSFGVLK

SEQ ID NO: 2188 - DNA, 776 bp, Homo sapiens
  ref <308>: DATABASE ACCESSION NUMBER: Refseq / NM_013251
  ref <309>: DATABASE ENTRY DATE: 2001-02-03
tttctctctttgcaggagcaccggcagcaccagtgtgtgaggggagcaggcagcggtcctagccagttccttgatcctgccagaccacccagcccccggcacagagctgctccacaggcaccatgaggatcatgctgctattcacagccatcctggccttcagcctagctcagagctttggggctgtctgtaaggagccacaggaggaggtggttcctggcgggggccgcagcaagagggatccagatctctaccagctgctccagagactcttcaaaagccactcatctctggagggattgctcaaagccctgagccaggctagcacagatcctaaggaatcaacatctcccgagaaacgtgacatgcatgacttctttgtgggacttatgggcaagaggagcgtccagccagactctcctacggatgtgaatcaagagaacgtccccagctttggcatcctcaagtatcccccgagagcagaataggtactccacttccggactcctggactgcattaggaagacctctttccctgtcccaatccccaggtgcgcacgctcctgttaccctttctcttccctgttcttgtaacattcttgtgctttgactccttctccatcttttctacctgaccctggtgtggaaactgcatagtgaatatccccaaccccaatgggcattgactgtagaataccctagagttcctgtagtgtcctacattaaaaatataatgtctctctctattcctcaacaataaaggatttttgcatatg

SEQ ID NO: 2189 - protein, 121 aa, Homo sapiens
  ref <308>: DATABASE ACCESSION NUMBER: Refseq / NP_037383
  ref <309>: DATABASE ENTRY DATE: 2001-02-03
MRIMLLFTAILAFSLAQSFGAVCKEPQEEVVPGGGRSKRDPDLYQLLQRLFKSHSSLEGLLKALSQASTDPKESTSPEKRDMHDFFVGLMGKRSVQPDSPTDVNQENVPSFGILKYPPRAE

SEQ ID NO: 2190 - DNA, 346 bp, Rattus norvegicus; identical to SEQ ID NO: 2028
  misc_feature (1)..(346): n=a, c, g or t
  ref <308>: DATABASE ACCESSION NUMBER: EMBL / AA875665
  ref <309>: DATABASE ENTRY DATE: 2000-03-03

SEQ ID NO: 2191 - DNA, 1454 bp, Homo sapiens; identical to SEQ ID NO: 2029
  ref <308>: DATABASE ACCESSION NUMBER: Refseq / NM_020650
  ref <309>: DATABASE ENTRY DATE: 2003-03-01

SEQ ID NO: 2192 - protein, 328 aa, Homo sapiens; identical to SEQ ID NO: 2030
  ref <308>: DATABASE ACCESSION NUMBER: Refseq / NP_065701
  ref <309>: DATABASE ENTRY DATE: 2003-03-01

SEQ ID NO: 2193 - DNA, 3216 bp, Rattus norvegicus
  ref <308>: DATABASE ACCESSION NUMBER: Refseq / NM_017007
  ref <309>: DATABASE ENTRY DATE: 2000-11-01
gaattccgaagcagccccggggtgacacccagcacgtacgtctgtggcagagcaaagccaagcgggggacgttcgcggaggagtcgcgggagggtccagctccctgtggctgaatcgagcccgttcctgcgcccagaccgcgggggacacttgaacagtagagaccccaagaccaccgagctgatggcatcttccacgccttcgcctgcaacctcctcgaacgcgggagcggatcctaatactaccaacctgcgtcctacaacatatgatacttggtgtggcgtagcccatggatgcaccagaaaactgggcctgaagatctgtggtttcttgcaaaggaccaatagcctggaagagaagagtcgtcttgtgagcgccttcagggagaggcaggcctccaagaacctgctttcctgtgaaaacagtgaccctggtgcccgcttccggcgcacagagacggacttctccaacctgtttgctcaagatctgcttccagctaagaacggggaggagcaaactgtgcagttcttactggaggtggttgacatactcctcaactatgtccgcaagacgtttgatcgctccaccaaggttttggacttccaccacccacaccagttgctggaaggcatggaaggttttaatttggagctgtctgaccaccccgagtctctggagcagatcctggttgactgtagagacaccctaaagtacggggttcgcacaggtcaccctcggtttttcaaccagctctctactggtttggatatcattggtttagctggcgaatggctgacatcaactgccaataccaatatgttcacatatgaaattgcacccgtgtttgttcttatggaacagatcacacttaagaagatgcgagagatcattggatggtcaaataaagatggtgatgggatattttctcctgggggagccatatccaacatgtacagcatcatggcggctcggtacaagtactttccagaagtgaaaacaaaaggcatggcggctgtgcccaaactggtcctcttcacctcagaacacagtcactattccataaagaaggctggggctgcgcttggctttggaactgacaatgtgatcctgataaagtgcaatgaaagggggaagataattccagctgatttagaggcaaaaattcttgatgccaaacaaaagggatttgttcccctttatgtcaatgcaaccgcaggcacgactgtttatggagcgtttgatccgatccaggagattgcagacatatgtgagaaatacaacctttggctgcatgtggatgctgcctggggtggtgggctgctcatgtcccggaagcatcgccacaaactcagcggcatagaaagggccaattcagtcacctggaaccctcacaagatgatgggtgtgctgctccagtgttctgccatcctggtcaaggaaaagggtatactccaaggatgcaaccagatgtgtgcaggctacctcttccagccagacaagcagtatgacgtctcctacgatacaggggacaaggcgattcagtgtggccgccatgtggacatcttcaagttctggctgatgtggaaagcaaagggcactgtgggatttgaaaatcagatcaacaaatgcctggagctggctgaatacctctatgccaagattaaaaacagagaagagtttgagatggttttcaatggtgagcctgagcacacaaatgtctgtttctggtacataccacaaagcctccgaggggttccagacagccctgagcgacgagaaaaactacacagggtggctcccaagatcaaagccctgatgatggagtcaggaacaaccatggttggttaccagcctcaaggggacaaggccaacttcttccggatggtcatctccaacccagccgccacccagtctgacatcgatttcctcatcgaggaaatagagaggttgggtcaagatctgtaatccccccccctttgcagaaccgtaatcaccggccatagccctgcccctctggcaccctagaacgcagttctgtcagtagttgacacacctaggccatttcactgaaggaaattataatctcttaaagaatatttgtcacatctcacgtaagcttgtttgttagaattagcgggaaataatgttcttttaaaaaaattgcacattagaaacacagtatatatgtacagttatatatatatatatacctctctctatgtactatgtatgtatagtgaatgtggcttagtcctagaccacagcatgtcgctcgctcccagggaattagcctcacccccagcaattactaagaggctaaccatctcgcaagcaactgcaggacagatggtacccccactgcagtgtcctagggacccagggaaaggccgttgctgggagcctaccaccctgctagagctgtccccacctgaatggatggatgatggatggcaggaagtaccagtagatgacaaatgtcacaccctccctgttagtgccctgctaggggatatagtagcagagtctttgtcacaattgtgctgttgctgcgttttagagattaatctgtgtaaactgtacattaccgttgtctatctttgggcagggggaagtgcatataatgatttaattgtacgtcagtgagatatttgcttatttatattcaaatatatatcatgttaaagagacatcttgtattttcttcccatttgtaatgtatcttatttatatattaatggagtaagttctggatactgtttatggtattttcgtgcatttgtgagccaaagagaaaagatgaaaattagtgagacttgcatttatatttgagtgcccttaacataatgatttgaacacatgtgtactgtctggaaacgaattctgatactgtacatagagtggcgttatggaaatcttgcttcagtagcctttgctcttctctttcccccctcaggctgtacgtcaggtgttctcaaagcttttctagtaactgttgaaaaataatgactagatctcctgtaattttgtagtagtatatgaccaatctctgtgactcgcttagctgaaacctaaggctatgtttccgaagatctccgatacactgaccagtcccacaagtgtttttgaagacatgaaacccacactgtgcatttagagtatgcaagaagaatataaataaaataaaaaatattctccatgaaaaaaaaaaaaaaaaaa

SEQ ID NO: 2194 - protein, 593 aa, Rattus norvegicus
  ref <308>: DATABASE ACCESSION NUMBER: Refseq / NP_058703
  ref <309>: DATABASE ENTRY DATE: 2000-11-01
MASSTPSPATSSNAGADPNTTNLRPTTYDTWCGVAHGCTRKLGLKICGFLQRTNSLEEKSRLVSAFRERQASKNLLSCENSDPGARFRRTETDFSNLFAQDLLPAKNGEEQTVQFLLEVVDILLNYVRKTFDRSTKVLDFHHPHQLLEGMEGFNLELSDHPESLEQILVDCRDTLKYGVRTGHPRFFNQLSTGLDIIGLAGEWLTSTANTNMFTYEIAPVFVLMEQITLKKMREIIGWSNKDGDGIFSPGGAISNMYSIMAARYKYFPEVKTKGMAAVPKLVLFTSEHSHYSIKKAGAALGFGTDNVILIKCNERGKIIPADLEAKILDAKQKGFVPLYVNATAGTTVYGAFDPIQEIADICEKYNLWLHVDAAWGGGLLMSRKHRHKLSGIERANSVTWNPHKMMGVLLQCSAILVKEKGILQGCNQMCAGYLFQPDKQYDVSYDTGDKAIQCGRHVDIFKFWLMWKAKGTVGFENQINKCLELAEYLYAKIKNREEFEMVFNGEPEHTNVCFWYIPQSLRGVPDSPERREKLHRVAPKIKALMMESGTTMVGYQPQGDKANFFRMVISNPAATQSDIDFLIEEIERLGQDL

SEQ ID NO: 2195 - DNA, 543 bp, Rattus norvegicus
  misc_feature (1)..(543): n=a, c, g or t
  ref <308>: DATABASE ACCESSION NUMBER: EMBL / AA800197
  ref <309>: DATABASE ENTRY DATE: 2000-03-03
acaaaacaaccatgttaggaaagacacaaaagtagaagtaaatgtctaagtaaaaactaaataaacatgccaagagctatgacttaaaaatcctaatgatgcactcggctacatccagacccaagacacaaatttactttgccacttaacaaaaaagaagcagaatgcccttcatcttcaatgtatttttaaatgtttgcacattgtgtgtctgcaggcaatggcagtatcatcaagtatttaaacaaagtcacctttcaggttgaatgaacaagtcacatcgaaatgtgcaatatattccaggacagccagggctgttacacagacatgctgtcaaaacaatacaaactccccaaacacctcaatataaatgtttaagaaaacaccagtattatataggcaatataattcattacaaaatacttttcttcataaaactatctgctttagacacaaaaggggtatgtggcccttctgtggtgctaacattaccagcttacacagattcgtctaacactgctctangaacagtgctgagaatgt

SEQ ID NO: 2196 - DNA, 543 bp, Rattus norvegicus
  ref <308>: DATABASE ACCESSION NUMBER: EMBL / AA874876
  ref <309>: DATABASE ENTRY DATE: 2000-03-03
tcagtgacaaaggaagccggagattagctccctccagcctagggattctgtcccaactcctgatttcggtaaaaataatctagtgccgatgtgcagttctggaaagccctcatgatacctccctggggttatttagctcagaatgcattacggtggccactcgggctaaggagagaattggagtgaagaagttgctttagagactagcagggctgagcagagagcaggcgctggccatcatggctcagtcccagcccacccaacccacaggcccttacacacaccacttctggcagcacaccctccctggccccatccttgccccttgtggtgggtgaggcagtgcccactgtgcagacagtcatggaggtacaggcaggaggcagccccctgtgagcaagaacagttgtaggaattgatgatgtcccataagcaaactgcaccagtgtgttctgcaggtctgttctgcaaaatgagcagcaatgtgtcaaattgatgcaaatgtaggtgtgtgatccttacaataaagtttttatgtgtttt

SEQ ID NO: 2197 - DNA, 1617 bp, Homo sapiens
  ref <308>: DATABASE ACCESSION NUMBER: EMBL / AF339812
  ref <309>: DATABASE ENTRY DATE: 2002-05-27
gaggctggattgtagccataagtggacttatgtccggtctgtgctacgacagcaaaatgttccaggtgcatcaggtgctctgcatccccagctggatggcaaaattcttttcttggacacttgaacccatcttctcttcttcagaacccaccagcgaagccagaattgggatgggagccacgctggacatccagagacagcagagaatggagctgctggaccggcagctgatgttctctcagtttgcacaagggaggcgacagagacagcagcagggaggaatgatcaattggaatcgtctttttcctcctttacgtcagcgacaaaacgtaaactatcagggcggtcggcagtctgagccagcagcgccccctctagaagtttctgaggaacaggtcgcccggctcatggagatgggattttccagaggtgatgctttggaagccctgagagcttcaaacaatgacctcaatgtcgccaccaacttcctgctgcagcactgatagtcccaggccaacactgggaccggaccggcagccgagtgacagtgcgtggtccccaccatcagatcagcccggggaccgagcatctctggtgctgatgttcttgtgggaagagggaggttccaccgcacccctgccctcaaccgcaagactgttgccgttttagtgtggagataagtttgccattacattagcatgtattttctatctatattttttattgggcattttccctaggttggagagtcagcactcgttttgaatgtgtttaaaatgcattaaaatggaagatttctgcaggcagttgaatggcactccagatggggaattgctgtaaccctcttactgtaacatgtcatctcctgcgtcgtgatggggagagggtaatgttacttcacaaaggacatgtcagatccttcttcatggacttttttagttactgttttttctctcaaacttgttttcgaatctcctgggagtgagggagaaacagggagctgaatcctcccccaagctgttccaggccagaggactctgcagtaccttctcctacatctagtaacaaagaatggtgataaccatgcactggttcaaggttctggagttctccatgaaacttgggttaattttgctcagagtatccggagttagccactaggctgcgggtgaaatgggatggagtagaacaacagcaggcttcctggagccacatgggctgactagggcactctgtggctggcctggcacgggctcagcccaggaagaggagaaacgatcccttgcctgcccctccctgtggcagggctaactgcctggccctcctggctcgcagccagccagccccctggcagcaggttctcctcagggcttgggtcttcaacctgtggcgacaggaggcagggcagactgtggaggacaggatgcaggtcagggagagggaaggcaggggtggaccgccatgagcatgaaaagacccgaagcaagttgactcttgcaatgtgcaactgttatgttctgcaaaatgagcaacgatgtatcaaattgatgcaaatttagatgttgatacttacaataaagtttttaatgtgttttaaaaaaaaaaaaaaaaaaaaaa

SEQ ID NO: 2198 - DNA, 507 bp, Rattus norvegicus; identical to SEQ ID NO: 2010
  ref <308>: DATABASE ACCESSION NUMBER: EMBL / Z38067
  ref <309>: DATABASE ENTRY DATE: 1996-03-13

SEQ ID NO: 2199 - DNA, 446 bp, Rattus norvegicus
  misc_feature (1)..(446): n=a, c, g or t
  ref <308>: DATABASE ACCESSION NUMBER: EMBL / AA875194
  ref <309>: DATABASE ENTRY DATE: 2000-03-03
aagaattcggcacgagggggccgcaaaggtttttttntnttttgtcttaagataggagcctaagctggcctagaactcgatgggtagcctataaacaccttaaactgattgtcatgcctgcatttctcacgcactgggcatgctggtgtgcacccacacccggagggaggtttgctggggttttctaaattaacattagattttaattaattttcgatttgtgtcgagctctgtttactgttcaagatgtttaaataagaaggattggtagttctccatgttaacatgacagagtccttgtaagctcggtgaacttactggtcacctaactgagccaaaggaaagactcaatacgatctttccggatctgctagggctataaatcttttccgagactagacgcccattgaatttatttttgtctttttgtgtttaacaggacaaac

SEQ ID NO: 2200 - DNA, 636 bp, Rattus norvegicus
  ref <308>: DATABASE ACCESSION NUMBER: EMBL / AF004661
  ref <309>: DATABASE ENTRY DATE: 2001-11-30
taccatgttctgtgcctcaccctgacggaggtttcagcccataccgtggagctaaatgaaatgtttggccagatccagtcccctggctatccggattcctatccgagtgactcggaggtgacctggaatattactgtcccggaggggttccgggtccagctttacttcatgcacttcaacttggaatcctcctacctttgtgaatatgactatgtgaaggtagaaaccgaagaccaggtgctggcaaccttctgtggcagggagaccaccgataccgagcagaccccgggccaggaagtggttctttcgcctggttcctttatgtctgtcactttccggtcagatttctccaatgaggaacgattcacaggttttgacgcccactacatggctgtagatgtggatgagtgcaaggaaagggaagatgaggagctgtcctgtgaccactactgccacaactacatcggcggctactactgctcctgtcgctttggctacatcctccacacagacaacaggacctgccgagtggaatgcagtggcaatctctttacccagaggacaggcacaatcaccagcccggattaccccaacccttaccccaagagctctgaatgttcctataccattgacctg

SEQ ID NO: 2201 - DNA, 1944 bp, Rattus norvegicus
  ref <308>: DATABASE ACCESSION NUMBER: Refseq / NM_012956
  ref <309>: DATABASE ENTRY DATE: 2003-01-14
tcccgaatgacctgccgccgactaagttgcattccttgaatcttcgcagaaagacaattctttcatcagagttagtaatgtggacagtacaaaatcgagagagtttggggcttctctcttttcctgtgatggttgccatggtttgttgtgcacacagctccaatgaacccagcaacatgtcatacgtgaaagagacagtggaccgactgctcaaaggatatgacattcgcttgcggccagactttggagggcccccggtggacgtcgggatgcggatcgatgtcgccagcatagacatggtctcggaagtgaatatggattatacactcaccatgtatttccagcagtcttggaaggacaagagactttcatattctggaatcccattaaatctgacccttgacaacagggtagctgaccaactctgggtaccagacacctactttctcaatgacaagaagtcatttgtgcatggggtcacagtgaaaaaccgaatgatcaggcttcatcctgatggaactgttctctatggactacggatcacaaccactgcagcttgcatgatggatctccgaagataccctctggatgagcaaaactgcaccctggagatcgaaagttatggctataccaccgatgacatcgaattttactggaatggaggagagggagcagtaactggggtcaataaaattgagcttccccaattttcaattgtcgactacaagatggtgtccaagaaggtggaattcacaacaggggcatatccacgactatcactaagttttcgtctaaagagaaacatcggttacttcattttgcagacctacatgccctccacactgattacaattctgtcctgggtgtcgttttggatcaactatgatgcatctgcagccagagtcgccctaggaatcaccacggtgctgaccatgacaaccatcagtactcacctcagggagactctgccaaagatcccttacgtcaaagcgattgatatctatctcatgggttgttttgtgttcgtgttcctggctctactggagtacgcctttgtaaattacattttcttcggaaaaggccctcagaaaaaaggagcgagcaaacaagaccagagtgccaatgaaaagaacaaactggagatgaacaaagtccaggttgatgcccacggcaatattctcctcagcaccctggaaatcaggaatgagaccagtggctccgaggtgctcacgggtgtaagtgaccccaaggccactatgtactcatacgacagcgccagcatccagtaccgcaaaccactgagcagccgtgagggcttcggacgagggctggacaggcacggggtgcccggcaagggtcgcatccgcagacgtgcctctcagctcaaagtgaagatccctgacttgactgacgtgaactccatagacaagtggtcccgaatgttcttccccatcacattttccctttttaatgtcgtttattggctttactatgtacactaagttcagtctcatggttcggtttagactcctttcctcctcgcttgttttttaaccccacagatttccaacagtggtaactgctatggtttttgaggtaagagattccgccttccagttggttttcgatcttgtgtgtcagtttttattatcacaccatgtttacttcaacaacaacaacaaaaggtattttttcctgtctattgtggtccaaggtaccagctctgtaagagttccatcaattactttgtttacaaacacaaagagaggtaggtgggtgttagacattgttggcagtcattcttagttgccctggatcttactggattattttaaaatgaaaatgtacagtggaccctgccgtccacctgcactgtgttctgggtaaactgtaaccatctcatgctgccaaacaattaaatagaaaatttaaaaaaaaaaaaag

SEQ ID NO: 2202 - protein, 474 aa, Rattus norvegicus
  ref <308>: DATABASE ACCESSION NUMBER: Refseq / NP_037088
  ref <309>: DATABASE ENTRY DATE: 2003-01-14
MWTVQNRESLGLLSFPVMVAMVCCAHSSNEPSNMSYVKETVDRLLKGYDIRLRPDFGGPPVDVGMRIDVASIDMVSEVNMDYTLTMYFQQSWKDKRLSYSGIPLNLTLDNRVADQLWVPDTYFLNDKKSFVHGVTVKNRMIRLHPDGTVLYGLRITTTAACMMDLRRYPLDEQNCTLEIESYGYTTDDIEFYWNGGEGAVTGVNKIELPQFSIVDYKMVSKKVEFTTGAYPRLSLSFRLKRNIGYFILQTYMPSTLITILSWVSFWINYDASAARVALGITTVLTMTTISTHLRETLPKIPYVKAIDIYLMGCFVFVFLALLEYAFVNYIFFGKGPQKKGASKQDQSANEKNKLEMNKVQVDAHGNILLSTLEIRNETSGSEVLTGVSDPKATMYSYDSASIQYRKPLSSREGFGRGLDRHGVPGKGRIRRRASQLKVKIPDLTDVNSIDKWSRMFFPITFSLFNVVYWLYYVH

SEQ ID NO: 2203 - DNA, 619 bp, Rattus norvegicus
  ref <308>: DATABASE ACCESSION NUMBER: EMBL / AA893208
  ref <309>: DATABASE ENTRY DATE: 2000-03-03
tcgacacctgtctctggtctcgatggctcaggagccaggccgggtactgctttctctttctgccctatgcctaactgatctgctctctgtatttgagtcaccctactgtcttctctcacctcaattgttttgacagtttcctgtatttatcctttgaccagctggggttctttctgaaatgcacagttggctgagtcttttctgcccaccaactctccccagctctccactgcccttaggataaagtccagactctgtagtgtggtgtgtgaggctcttgggtccctattagcttcatcactcaacatgcgctctgggcccagcctcctgtatgcagagactatggctctagctgctttgattcccttccttccacttactttggcaatttgccacttttcctcggagattttattccttccaaggagcctcaaatgtcccctctccttccctaaccccaactgccacacagatccttctaggcctgcgatatggtctgccctgctcccctactagactggaagctcctcgagggcagggaaagcccttggggtttttattatctactacctgattttggcgcctggcccgaggaaggcactcaataaatgttttgttt

SEQ ID NO: 2204 - DNA, 347 bp, Rattus norvegicus
  ref <308>: DATABASE ACCESSION NUMBER: EMBL / X90642
  ref <309>: DATABASE ENTRY DATE: 1995-10-27
aaggttggtattgtgggtcgtacaggagctgggaaatcatctctcaccctgggtttgttccggatcaatgagtctgcagaaggggagatcatcattgatggcatcaacatcgccaagattggcctgcacaacctgcgcttcaagatcaccatcattccacaggatcctgttttgttctcgggttccctccgcatgaacctggaccctttcagtcagtattctgatgaagaagtctggatggctctggagcttgctcacctgaagggctttgtgtcagccttgcctgacaagctgaaccatgagtgtgcagaaggtggagagaatctgagtgtggggcagcgacagct

SEQ ID NO: 2205 - DNA, 3471 bp, Rattus norvegicus
  ref <308>: DATABASE ACCESSION NUMBER: EMBL / AF016296
  ref <309>: DATABASE ENTRY DATE: 2003-01-25
ggcacgaggaccggctgaggattttatggttcttaagcggacttaagagcgttgtttcggattgttaagattcccgtttgctgggttttcctccctcaatcgtgctctcccgcggctgcctggggactggctcggcgaaggaggatggagagggggctgccgttgctgtgcgccacgctcgcccttgccctcgccctggcgggcgctttccgcagcgataaatgtggcgggactataaaaattgaaaacccggggtaccttacatctcccggctaccctcattcttaccatccaagtgagaaatgtgaatggctaatccaagctccggagccctaccagagaatcatgatcaacttcaacccacatttcgatttggaggacagagactgcaagtatgactatgtggaagtgatcgatggagagaatgaaggtggccgcctgtgggggaagttctgtgggaagatcgcaccttcacctgtggtgtcttcagggccatttctcttcatcaaatttgtctctgactatgagacccacggggcaggattttccatccgctatgaaatcttcaagagagggcccgaatgttctcagaactatacagcacctactggagtgataaagtcccctgggttccctgaaaaataccccaacagcttggagtgcacctacatcatctttgcaccaaagatgtctgagataatcctagagtttgaaagttttgacctggagcaagactcaaatcctcccggaggagtgttctgtcgctatgaccggctggagatctgggatggattccctgaagttggccctcacattgggcgttactgtgggcagaaaactcctggccggatccgctcctcttcaggcattctatccatggtcttctacactgacagcgcaatagcaaaggaaggtttctcagccaactacagcgtgctgcagagcagcatctctgaagatttcaagtgtatggaggctctgggcatggaatctggagagatccattctgaccagatcactgcatcttcccagtatggtaccaactggtctgttgagcgctcccgcctgaactaccctgaaaacgggtggacaccaggagaggactcctacagggagtggatccaggtggacttgggcctcctgcgattcgttactgctgtggggacacagggtgccatttccaaggaaaccaagaagaaatattatgtcaagacttacagagtagacatcagctccaacggagaggactggatcaccctgaaggagggaaataaagccattatctttcagggaaacaccaatcccacggatgttgtctttggagttttccccaaaccactgataactcgatttgtccgaatcaaacctgcatcctgggaaactggaatatctatgagatttgaagtttatggctgcaagataacagattacccttgctctggaatgttgggcatggtgtctggacttatttcagactcccagattacagcatccaaccaaggagacaggaactggatgccagaaaacatccgcctggtgaccagtcgaaccggctgggccctgccaccctcaccccacccatacatcaatgaatggctccaagtggacctgggagatgagaagatagtaagaggtgtcatcattcaaggtgggaagcaccgagaaaacaaagtgttcatgaggaagttcaagatcgcctacagtaacaatggttctgactggaaaatgatcatggatgacagcaagcgcaaggctaagtcttttgaaggcaacaacaactatgacacacctgagctccgggcctttacacctctctccacaagattcatcaggatctaccccgagagagccacacatagtgggctcggactgaggatggagctactgggctgtgaagtagaagtgcctacagctggacccacgacacccaatgggaaccccgtggacgagtgtgacgatgaccaggccaactgccacagtggcacaggtgatgacttccagctcacaggaggcaccactgtcctggccacagagaagccaaccattatagacagcaccatccaatcagagttcccgacatacggttttaactgcgagtttggctggggctctcacaagacattctgccactgggaacatgacagccacgcgcagctcaggtggagggtgctgaccagcaagacggggcccattcaggaccacacaggagatggcaacttcatctattcccaagctgatgaaaatcagaaaggcaaagtagcccgcctggtgagccctgtggtctattcccagagttctgcccactgcatgaccttctggtatcacatgtccggctctcatgtgggtacactgagggtcaaactgcactaccagaagccagaggaatatgatcaactggtctggatggtggtcgggcaccaaggagaccactggaaggaagggcgtgtcttgctgcacaaatctctgaaactgtatcaggttatttttgaaggtgaaatcggaaaaggaaacctcggtgggattgctgtggatgatatcagtattaacaaccacattcctcaggaggactgtgcaaaaccaacagacctagataaaaagaacacagaaattaaaatagatgaaacagggagcaccccaggatatgaagaagggaaaggcgacaagaacatctccaggaagccaggcaatgtgcttaagaccctggaccccatcctgatcaccatcatagccatgagtgccctgggggtgctcctgggtgcagtctgtggagttgtgctgtactgtgcctgttggcacaatgggatgtcggaaaggaacctatctgccctggagaactataactttgaacttgtggatggtgtaaagttgaaaaaagataaactgaacccacagagtaattactcagaggcgtgaaggcacggagctggagggaacaagggaggagcgcggcaggagaacagtggaggcgcagggactctgttactctgctttcactgtaagctgggaagggcggggactctgttactccgctttcactgtaagctcggaagggcatccgcgatgccatgccaggcttttctcaggagcttcaatgagcatcacctacagacacaagcaggtgactgcggtaacaacaggaatcatgtacagcctgctttcttctcttggtttcgtttgggtaatcagaagccagttgagaccaagtgtgactgacttcatggttcatcctacttggccccctttttcctctctttctccttaccctgtggtggattcttctcggaaactgcaaaatccaagatgctggcactaggcgttgttcagtgggctctttcgatggacatgtgacctatagcccagtgcctagagcatattagcataaccacatttcaggggacaccaatgtccgcttttgcatcgctacgtgcagcgagcacaggaaaaagaaaaaaaaaaaaaaaaaaactcgag

SEQ ID NO: 2206 - protein, 923 aa, Rattus norvegicus
  misc_feature (1)..(923): Xaa=Unknown amino acid
DGEGAAVAVRHARPCPRPGGRFPQRXMWRDYKNXKPGVPYISRLPSFLPSKXEMXMANPSSGALPENHDQLQPTFRFGGQRLQVXLCGSDRWREXRWPPVGEVLWEDRTFTCGVFRAISLHQICLXLXDPRGRIFHPLXNLQERARMFSELYSTYWSDKVPWVPXKIPQQLGVHLHHLCTKDVXDNPRVXKFXPGARLKSSRRSVLSLXPAGDLGWIPXSWPSHWALLWAENSWPDPLLFRHSIHGLLHXQRNSKGRFLSQLQRAAEQHLXRFQVYGGSGHGIWRDPFXPDHCIFPVWYQLVCXALPPELPXKRVDTRRGLLQGVDPGGLGPPAIRYCCGDTGCHFQGNQEEILCQDLQSRHQLQRRGLDHPEGGKXSHYLSGKHQSHGCCLWSFPQTTDNSICPNQTCILGNWNIYEIXSLWLQDNRLPLLWNVGHGVWTYFRLPDYSIQPRRQELDARKHPPGDQSNRLGPATLTPPIHQXMAPSGPGRXEDSKRCHHSRWEAPRKQSVHEEVQDRLQXQWFXLENDHGXQQAQGXVFXRQQQLXHTXAPGLYTSLHKIHQDLPRESHTXWARTEDGATGLXSRSAYSWTHDTQWEPRGRVXRXPGQLPQWHRXXLPAHRRHHCPGHREANHYRQHHPIRVPDIRFXLRVWLGLSQDILPLGTXQPRAAQVEGADQQDGAHSGPHRRWQLHLFPSXXKSERQSSPPGEPCGLFPEFCPLHDLLVSHVRLSCGYTEGQTALPEARGIXSTGLDGGRAPRRPLEGRACLAAQISETVSGYFXRXNRKRKPRWDCCGXYQYXQPHSSGGLCKTNRPRXKEHRNXNRXNREHPRIXRRERRQEHLQEARQCAXDPGPHPDHHHSHECPGGAPGCSLWSCAVLCLLAQWDVGKEPICPGELXLXTCGWCKVEKRXTEPTEXLLRGV

SEQ ID NO: 2207 - DNA, 2495 bp, Rattus norvegicus
  ref <308>: DATABASE ACCESSION NUMBER: Refseq / NM_012520
  ref <309>: DATABASE ENTRY DATE: 2002-11-05
attgcctaccccgggtggagaccgtgctcgtccggccctcttgcctcacgttctgcagctctgcagctccgcaatcctacaccatggcggacagccgggacccagccagcgaccagatgaagcagtggaaggagcagcgggcccctcagaaacccgatgtcctgaccaccggaggcgggaacccaataggagataaacttaatatcatgactgcggggccccgagggcccctcctcgttcaagatgtggttttcaccgacgagatggcacactttgacagagagcggattcctgagagagtggtacatgcaaagggagcaggtgcttttggatactttgaggtcacccacgatattaccagatactccaaggcaaaggtgtttgagcatattgggaagaggactcctattgccgtccgattctccacagtcgctggagagtcaggctcagctgacacagttcgtgaccctcgtgggtttgcagtgaaattctacactgaagatggtaactgggacctcgtgggaaacaacacccctattttcttcatcagggatgccatgttgtttccatcctttatccatagccagaagagaaacccacaaactcacctgaaggaccctgacatggtctgggacttctggagtctttgtccagagtctctccatcaggttactttcttgttcagcgaccgagggattccagatggacatcggcacatgaatggctatggctcacacaccttcaagctggttaatgcgaatggagaggcagtgtactgcaagttccattacaagactgaccagggcatcaaaaacttgcctgttgaagaggcaggaagacttgcacaggaagacccggattatggcctccgagatcttttcaatgccatcgccagtggcaattacccatcctggactttttacatccaggtcatgactttcaaggaggcagaaaccttcccatttaatccatttgacctgaccaaggtttggcctcacaaggactaccctcttataccagttggcaaactggtcttaaacagaaatcctgctaattattttgctgaagttgaacagatggcttttgacccaagcaacatgccccctggcattgagcccagcccggacaagatgctccagggccgcctttttgcttacccagacactcaccgccaccgcctgggaccaaactatctgcagatacctgtgaactgtccctaccgtgctcgcgtggccaactaccagcgcgatggccccatgtgcatgcatgacaaccagggtggtgctcccaactactaccccaacagcttcagcgcaccagagcagcagggctcggccctggagcaccatagccagtgctctgcagatgtgaagcgcttcaacagtgctaatgaagacaacgtcactcaggtgcggacattctatacgaaggtgttgaatgaggaggagaggaaacgcctgtgtgagaacattgccaaccacctgaaagatgctcagcttttcattcagaggaaagcggtcaagaatttcactgacgtccaccctgactacggggcccgagtccaggctcttctggaccagtacaactcccagaagcctaagaatgcaattcacacctacgtacaggccggctctcacatagctgccaagggaaaagctaacctgtaaagcacgggtgctcagcctcctcagcctgcactgaggagatccctcatgaagcagggcacaagcctcaccagtaatcatcgctggatggagtctcccctgctgaagcgcagactcacgctgacgtctttaaaacgataatccaagcttctagagtgaatgatagccatgcttttgatgacatttcccgagggggaaattaaagattagggcttagcaatcacttaacagaaacatggatctgcttaggacttctgtttggattattcatttaaaatgattacaagaaaggttttctagccagaaacatgatttgattagatatgatatatgataaaatcttggtgattttactatagtcttatgttacctcacagcctggtatatatacaacacacacacacacacacacacacacacaccaaaacacacatacactatacacacacacacacacacacactaaaacacacatacacaacacacacatacactacacacacagaacacacaacacaaacatacacacataggcacacacacacacacacacacacacacacacacacacacacacacacatgaatgaagggattataaagatggcccacccagaatttttttttatttttctaaggtccttataagaaaaaccatacttggatcatgtcttccaaaaataactttagcactgttgaaacttaatgtttattcctgtgtagttgattggattccttttccccttgaaattatgtttatgctgatacacagtgatttcacatagggtgatttgtatttgcttacatttttacaataaaatgatcttcatgg

SEQ ID NO: 2208 - protein, 527 aa, Rattus norvegicus
  ref <308>: DATABASE ACCESSION NUMBER: Refseq / NP_036652
  ref <309>: DATABASE ENTRY DATE: 2002-11-05
MADSRDPASDQMKQWKEQRAPQKPDVLTTGGGNPIGDKLNIMTAGPRGPLLVQDVVFTDEMAHFDRERIPERVVHAKGAGAFGYFEVTHDITRYSKAKVFEHIGKRTPIAVRFSTVAGESGSADTVRDPRGFAVKFYTEDGNWDLVGNNTPIFFIRDAMLFPSFIHSQKRNPQTHLKDPDMVWDFWSLCPESLHQVTFLFSDRGIPDGHRHMNGYGSHTFKLVNANGEAVYCKFHYKTDQGIKNLPVEEAGRLAQEDPDYGLRDLFNAIASGNYPSWTFYIQVMTFKEAETFPFNPFDLTKVWPHKDYPLIPVGKLVLNRNPANYFAEVEQMAFDPSNMPPGIEPSPDKMLQGRLFAYPDTHRHRLGPNYLQIPVNCPYRARVANYQRDGPMCMHDNQGGAPNYYPNSFSAPEQQGSALEHHSQCSADVKRFNSANEDNVTQVRTFYTKVLNEEERKRLCENIANHLKDAQLFIQRKAVKNFTDVHPDYGARVQALLDQYNSQKPKNAIHTYVQAGSHIAAKGKANL

SEQ ID NO: 2209 - DNA, 505 bp, Rattus norvegicus
  ref <308>: DATABASE ACCESSION NUMBER: EMBL / AA866369
  ref <309>: DATABASE ENTRY DATE: 2000-03-03
ataacaatggtaagtattattagctgcccttgtgttagtgaagaggaacatttttaatctttcagaaattttcgtgacatgtaaagtgcaattgtgaggaatgtgtgggtgtacgaaaatgtatctgtcaagttcagagtcctctagattaaaaagaaaacttatatgattatcaatggtgccgttaatagatgtgttggacaatgggtgtaccccatttttgcaattattctcaaaacaaatctatgttcagatgctttaaaattttatcacatgatacaaaaatataactttgtcagcctttaaaagttctttctttcttttacttattttttttccttcaaaaatcaatgaagacttgatttctgtcactcattgtattgagggtgaatatactacctgaattttgtgcatgttacattgtagttgtaaccttttctaattcaggatgaatacaagatggttgtgattgtgcagtgtatcaataaagtttgaagaaatttgt

SEQ ID NO: 2210 - DNA, 1540 bp, Homo sapiens
  ref <308>: DATABASE ACCESSION NUMBER: EMBL / AF070577
  ref <309>: DATABASE ENTRY DATE: 1999-06-30
aagagaagtcagcaagttctatttatgctgaaagaactattccatgagaaaagcagagaaccccaaagtgggcaggcaaccccgacgagagcttatccctgtggcggcatcaggagtggctgtacattgaattttcaagtgctggttggctgtcgccagcccatggtaggaggggaggaatggcttaagatgaggtaagatctggtggtggggcatctttcctcaattccatactgactttgatcttgagaaagaaaaactggctatgcattacctaaaaccagtccaaaatgaaacagaccaacacacacacaaaagcaaattgtcaatccctttggaattaagggaagcagcataaggtttttctttttggaaaaaatgcatttattttctttttctccaacagcaagaatcttttgttttcattttgcacgtgaccttatcttggaaactcttatacccaattgcctcccctcctattattcagagcttccctgtctttttacttgaagacaaataagtttgagcacttgagtaaaacttcacaggtgtgtaagtaggaaggcaacattttcaaaaagagaccatatgatgagaacgcctaatgatcaccacatgcaaacaaacaaaactgccagtctcatttcccacatttcttacttaagagaagagaagtaaatgaaaggaagaagaaatagatttgtaattaaagatgtggcaaaaaagatagggctgagccagttcaatttagccttcaggtgcagaatacttaggagtccaaagaaatgtggagtggacttaattagatgcagttgtctttatcctgaaagtagtgagctaagcctaatttccagcattttgaaagagattcctttttgtttctttccatggtgccctctttaaggcacagagttgctccacaccactgggtggagaaagaaagattgcgaacccttgaccatccttttgaggctacattctatgttatttggcagatttataaagctatcagtaataacaatgctatgtactgcaagctgcccttgtgttagttaaagggagcatttttaatcgttcggaaattttcgtgacatgtcaagtgcagttgtgaggactgtgtgggtgaacgaaaatgtgtctgtcaagttcagagtcctttagatttaaaaaaaaattatgacttatcaatggtgccgttatagctgtgtcagacaatgggtgtgcccattctcacaattatccttcaaaaaaaatctatgttcaaatgctttaaaaatttatcacacgatacaagagtatgactttgtcagccttctagagttcttttttcttttattttctttcgtattttttccttcaaaaaatcaatgaagacttgatttctgtcaataattgtatcaagggtgaatatactacctgaattttgtgcatgttacattgtagttgtaaccttttctaattcaggatgaatacgagatggttgtgattgtgcagtgtaccaataaagttcgagaaatttgtaaaaaaaaaaaaaaaaaaa

SEQ ID NO: 2211 - DNA, 367 bp, Rattus norvegicus
  ref <308>: DATABASE ACCESSION NUMBER: EMBL / AA800513
  ref <309>: DATABASE ENTRY DATE: 2000-03-03
ggtacaatgatagtaaatttctaaaagatatccaacaagccagcagtaaaaagtgaaaggttggcctgctggcccccacaactccgtttctgcacagctgaatcagaatctggtgaggccagggcagctctcccctgcgggcgactcgggctcactgagccacatccacaccgtcagacttatcgagatttcccaaccagtgagagtgtgaaaactctgctcagagaagcaagcctgtgcggctgtcctgattcctggctaacacagggtttcccaggccctgcagaaggtctgtgcacagcgcacagctgctctgaggtgcagcgtctgaagtcaagggatggaggggacaatctcaatctgccct

SEQ ID NO: 2212 - DNA, 364 bp, Homo sapiens
  misc_feature (1)..(364): n=a, c, g or t
  ref <308>: DATABASE ACCESSION NUMBER: EMBL / AA807347
  ref <309>: DATABASE ENTRY DATE: 2000-03-03
ttttttttttttttttttttttttttttccttttataaaatatttattctaaaaaaaaaaatcacactgtacaaatttagatagaacattatcaatgctcagatttataaaaatgggaacagaaaagactataagcctcagcgcggagagggganacccgctanacacaattttttcgctcggttnttntngtnggggtccctnctttttttntanaangagacnccctngaagggtttttcttcctcaaaggaaaatttcnccggcgccggggagggggccggnggcggccgcccgggcccccccccttnnttnttnnntnnttnttgtttnnttttttttttttttnttttttttttttttt

SEQ ID NO: 2213 - DNA, 2099 bp, Rattus norvegicus; identical to SEQ ID NO: 1654
  ref <308>: DATABASE ACCESSION NUMBER: Refseq / NM_013053
  ref <309>: DATABASE ENTRY DATE: 2003-01-14

SEQ ID NO: 2214 - protein, 245 aa, Rattus norvegicus; identical to SEQ ID NO: 1655
  ref <308>: DATABASE ACCESSION NUMBER: Refseq / NP_037185
  ref <309>: DATABASE ENTRY DATE: 2003-01-14

SEQ ID NO: 2215 - DNA, 443 bp, Rattus norvegicus
  ref <308>: DATABASE ACCESSION NUMBER: EMBL / AA892504
  ref <309>: DATABASE ENTRY DATE: 2000-03-03
tggtctccatgctgttgctctatgtcttctacatcgggctcctgggctcctaggacccactttaccccttccctccccaccttctatttataagacctcctgttcagcctgtccccaccggtggtgccttcagccctaccaaagacactagtgtaccctcacaaacactgacctcagaagcccactctagtgcccacagtagcccttaccgttagtactgacggtaccttcgggtcctccccaccagccctctgcccccacccccacctccatcctgtgccccagggatgacaggaactcagcttttccctatctgtcctccctccccctactggctgctatggggagctaaattatctctgttttgtagagagaactctatttgtaggggatgtgagcccagtatgggctctcagctctgtgtataaactgtatagactgtc

SEQ ID NO: 2216 - DNA, 2836 bp, Homo sapiens
  ref <308>: DATABASE ACCESSION NUMBER: Refseq / NM_002319
  ref <309>: DATABASE ENTRY DATE: 2000-10-31
atggcggcggccgtagcggctccactcgccgccgggggtgaggaggcggcagccacgacctccgtgcccgggtctccaggtctgccggggagacgcagtgcagagcgggccctagaggacgccgtggccaccgggaccctgaacctgtctaaccggcgcttgaagcacttcccccggggcgcggcccgtagctacgacctgtcagacatcacccaggctgacctgtcccggaaccggtttcccgaggtgcccgaggcggcgtgccagctggtgtccctggagggcctgagcctctaccacaattgcctgagatgcctgaacccagccttggggaatctcacagccctcacctacctcaacctcagccgaaaccagctgtcgctgctgccaccctacatctgccagctgcccctgagggtcctcatcgtcagcaacaacaagctgggagccctgccccctgacatcggcaccctgggaagcctgcgacagcttgacgtgagcagcaacgagctccaatccctgccctcggaactgtgtggcctctcttccctgcgggacctcaatgtccggaggaaccagctcagtacgctgcccgaagagctgggggacctccctctggtccgcctggatttctcctgtaaccgcgtctcccgaatcccagtctccttctgccgcctgaggcacctgcaggtcattctgctggacagcaaccctctgcagagtccacctgcccaggtctgcctgaaggggaaacttcacatcttcaagtatttgtccacagaggccgggcagcgtgggtcggccctgggggacctggccccttctcggcccccgagtttcagtccctgccctgcagaggatctatttccgggacatcggtacgatggtgggctggactcaggcttccacagcgttgatagtggcagcaagaggtggtctggaaatgagtcaacagatgaattttcagagctgtcattccggatctcagagctggcccgggagccccgggggcccagagaacgcaaggaggatggctcagcggacggagaccctgtgcagattgacttcatcgacagccatgtccccggggaggatgaagagcgaggcactgtggaggagcagcgaccacccgaattaagccctggggcaggggacagggagagggcaccaaacagcaggcgggaggagccggcaggggaggagcggcggcgcccggacaccttgcagctgtggcaggagcgggaacggcggcagcagcagcagagcggggcgtggggggccccgaggaaggatagcctcttgaagccagggctcagggctgttgtgggaggggccgccgccgtgtccactcaagccatgcacaacggctcgcctaagtccagtgcctcccaagcagggggctgcagcggggcagggagccccgcccctgcccctgcctcccaagagccccttcccatagctggaccagcgacagcacctgctccacggccacttggctccattcagagaccaaacagcttcctcttccgttcctcctctcagagtggctcaggcccttcctcaccagactctgtcctgagacctcggcggtacccccaggttccagatgagaaggacttaatgactcagctgcgccaggtccttgagtcccggctgcagcggcccctgcctgaggacctggccgaggctctggccagtggggtcatcctgtgccagctggccaaccagctacggccgcgctccgtgcccttcatccatgtgccctcccctgctgtgccaaaactcagtgccctcaaggctcggaagaatgtggagagttttctagaagcctgtcgaaaaatgggggtgcctgaggctgacctgtgctcgccctcggatctcctccagggcactgcccgggggctgcggaccgcgctggaggccgtgaagcgggtggggggcaaggccctaccgcccctctggcccccctctggtctgggcggcttcgtcgtcttctacgtggtcctcatgctgctgctctatgtcacctacactcggctcctggatccccgttccccccaggtggcctgggaggtggccccctcgaggatgactccactagcgccctgggaccccaagtatgaagccaaagcaggacctcggccggtgtgggtgagttgggggcaaacctgtgggactggctggggtgctcagggagctgtgcggtggcctgaggctccagtgctctgtcctcctcaccctagggggccaactgtagctcaggagcctcgttctcaggccggacgctgtgtcacccctcattctggccgctgtatgaagcagcctcgggcaggggtctcaggcccgtggcccctgccacagggcactggaatggacagcaggcgcccccagatgcagggttcccggtggtgtgctgtgaagatgtcttcctctcggaccctctgctgccccgggggcagcgtgttcccctgtacctgtccaaggccccccagcagatgatgggctccctgaaactgctgccgccgccccccatcatgtctgccagggtgctcccccgcccatcaccctcccggggcccctccactgcctggctcagcgggccggagctgatcgctctcactggcctgctgcagatgagccagggggagcctaggcccagctcctccgcggttggccccccagaccatacctctgacccacccagcccctgtggtagccccagcagttctcagggtgctgacctctctctcccacagaccccagacacccattgtccatagccttctcagggcagagtgggctggttgtgttgacaataaaacagtgttggtttgca

SEQ ID NO: 2217 - protein, 832 aa, Homo sapiens [sequence omitted]

SEQ ID NO: 2218 - DNA, 2697 bp, Rattus norvegicus
  ref <308>: DATABASE ACCESSION NUMBER: Refseq / NM_031024
  ref <309>: DATABASE ENTRY DATE: 2003-01-13
gtcggtccgcccgtgcgtgcgtctgtccgttcggcctccgtccggcccgcagcatggccggcgtcagcttcagcggccaccgcctggagctgctggcggcgtacgaggaggtgatccgggaggagagtgcagccgactgggctctgtacacttacgaagatggctcagatgacctcaagcttgcagcatcaggagaaggaggcttgcaggagctttcaggccacttcgagaaccagaaagtgatgtacggtttctgcagcgtcaaggactcccaggctgccttgccaaaatatgtgctcatcaactgggttggtgaggatgtgcctgatgcccgaaaatgtgcttgtgccagccatgtggccaaggtggctgaattcttccagggcgttgacgtaattgtgaatgccagcagtgtggaggatatcgatgctggcgccattgggcagcggctctccaatggactggctcggctctctagcccagtgctgcaccgcctgcgccttcgggaggatgagaatgctgagccggtgggcaccacctaccagaagacggatgcggccgtggagatgaagcggattaaccgtgagcagttttgggagcaggccaagaaggaggaggagctgcggaaggaggaggagcggaagaaggctttggatgccaggctcaggtttgagcaggagcggatggagcaggagcggcaggagcaggaggaacgggaacggcgctaccgagagcgggagcagcagatcgaggagcacaggaggaaacagcagagtctggaagctgaagaggccaagaggaggttaaaggatcagtctatctttggtgatcagcgagatgaagaggaagagtcccagatgaagaagtcggaatctgaggtggaggaggcagctgccatcattgcccagcggcctgataacccacgggagttcttcagacagcaggaacgagtggcttcagcctctggtggcagctgtgacgcaccctcgcccttcaaccaccgaccaggtcgtccgtactgccctttcataaaggcatcggacagtgggccttcctcctcctcctcttcctcctcttcccctccacggactccctttccctatatcacctgccaccgcaccccaaacctctcttcctccctcccatgcagtcacctggacagccaccggaggatggcgcccactcccattcccacccggagcccatctgattccagcacagcctccacccccatcacggagcagatcgagagggccctggatgaggtcacatcctcgcagcctccacccccacctccaccacccccaccagctcaagaggcccaggagtctgctcccagactggacggtgaagaggtctgcaaggaggccaaagtagcagcagctcctcaggtctgggctggctgtgcagaggagcctcctcgggcacaggaacctcccctgttgcaaagcagccccacggaggacttgatgtgcacagaatctcctgagcaggctgtcctggcggcctctccagagcctgatgcctctgtcacctcagtagctgatgctcatgcagctgacaccatcgagaccaccactgccactactgccaccactattgccgacaacgtcacccctgccgccgccagcctcattgatctgtggcctggtaacggggaagaggcctcaacgcctcaggctgaacccagggtgcccaccccaccctcaggtgctgaggcctccctggcagaggtgcctctgttgaatgaggcagctcaggagccgctgccaccagtgggcgaaggctgtgccaaccttcttaatttcgatgagctgccagaacctccagccaccttctgtgacccagaggaggaagccgaaggagagccgctggctgcctcccaggtcctaactatgccctcagccctagaggaggtagatcaggtgttggagcaggagttggagccagaacctcatctgctgaccaatggagagaccactcagaaggaggggacccagcaggccagcgaaggatacttcagtcagtcacaggaggaagaattcgcccaatcagaagagccatgtgcaaaggctccacctcctgtattctacaacaagcctccagaaatcgacatcacctgctgggatgcagacccagttcctgaagaggaagagggcttcgagggtggtgattagtagtggcgactgccccctggctgccctcgccaaggctgcccacctgcagtgcctctggccagccggcttgcagcgccagcattagcagcagccccgcctggctcccactctggattccggcactggccggggacctgtctgcttctctacccacagggcctgacttttacagcttttctcttttttttaaaagttgatagacttgtacaattgactggttttcctcccgttggtagttgaaacaatgttgcagattccacccccttcctgcccagaccagattgtagcttagtccttcctgctcagctgaccagggtggaggcctcaccctgcttgggacctggtgggggtcgggggttctggtgggaaaatgttcccccccatcacttttcctagttttatgtttcttggaaaaaaaatatcactttgtattctctatccagggcttcagatattttgcacgaaatttaaaacatggcaataaatggctcgtgggctctgaaaaaaaaaaaaaaaaaaa

SEQ ID NO: 2219 - protein, 707 aa, Rattus norvegicus
  ref <308>: DATABASE ACCESSION NUMBER: Refseq / NP_112286
  ref <309>: DATABASE ENTRY DATE: 2003-01-13
MAGVSFSGHRLELLAAYEEVIREESAADWALYTYEDGSDDLKLAASGEGGLQELSGHFENQKVMYGFCSVKDSQAALPKYVLINWVGEDVPDARKCACASHVAKVAEFFQGVDVIVNASSVEDIDAGAIGQRLSNGLARLSSPVLHRLRLREDENAEPVGTTYQKTDAAVEMKRINREQFWEQAKKEEELRKEEERKKALDARLRFEQERMEQERQEQEERERRYREREQQIEEHRRKQQSLEAEEAKRRLKDQSIFGDQRDEEEESQMKKSESEVEEAAAIIAQRPDNPREFFRQQERVASASGGSCDAPSPFNHRPGRPYCPFIKASDSGPSSSSSSSSSPPRTPFPYITCHRTPNLSSSLPCSHLDSHRRMAPTPIPTRSPSDSSTASTPITEQIERALDEVTSSQPPPPPPPPPPAQEAQESAPRLDGEEVCKEAKVAAAPQVWAGCAEEPPRAQEPPLLQSSPTEDLMCTESPEQAVLAASPEPDASVTSVADAHAADTIETTTATTATTIADNVTPAAASLIDLWPGNGEEASTPQAEPRVPTPPSGAEASLAEVPLLNEAAQEPLPPVGEGCANLLNFDELPEPPATFCDPEEEAEGEPLAASQVLTMPSALEEVDQVLEQELEPEPHLLTNGETTQKEGTQQASEGYFSQSQEEEFAQSEEPCAKAPPPVFYNKPPEIDITCWDADPVPEEEEGFEGGD

SEQ ID NO: 2220 - DNA, 5563 bp, Rattus norvegicus
  ref <308>: DATABASE ACCESSION NUMBER: EMBL / M75281
  ref <309>: DATABASE ENTRY DATE: 2000-03-04
cctatctaattcctctcaagttaaataaacaaatgtcaaagggcagatagtttttcctatctttgccctctgtccaaagagtaagccataaagccacctttaagtagcttccttcactgtacgcaatgactggtattaatatttgtggaaaaattcacttccctttggctaagttaaaggttgtttcagaagttttgcttcagaataggacattatgaatgatcccatatctcctgaaatacaacccctcgaattgtttatcttgaccttcgatgatactactctgttaggatgcaaaaacgaaagaatttctggaacaccaagggttcaacttggatgttgaaggaatttgaaggtcagagaaagttggtattttcagttaagcaagaataccaacctatgagagccaacatatgaagactaagacttgtggagaaagttagggtgaagagatcacctggagctgaggaaaaatacgaaataagggagatacagaagatatgggcatttggggaatgtgatgatgtggcccacaaagagacagagaggatgaagatctggcaaccagtttgagaaatgagaagagagcaaatatagagtgcagaaatagaaaaaggaggggaaagggtaaaaaaatatggtactgggaaggagccaatgcaaaccaagagtacaggataaaaggctaactcacttgcaagctgtactcgctgcctaatccaggtttactgcagttcctctccttgtcttggatcctagtccatttctaagaagatcatggcctacctgctccatgctcaactatttctactgactacctttatattagttttgaacatgagactttgtcctgttctaggtcactttctgggtggcatagagaagtctagcatggaggaggaaggagcctcagaagcattgaactatgctgtcaatgagtataatgaaaagaacagtgacttgtacctgagccgtgtggtggaagtgaaggatgtccaaaagcaggtatgtcactatttattgagagaccctgacttatagagggacacctatatctccttagtccatctaacattctctccaacctattgctctctgactctcttttagtctgttttgtaagtagtgattttaggtggacatattggcagtatttgcatgttatttacttcagtatgtcttttccttagatattttctgtcctgtaaaagtgcatgtaggtgagcttacccaaactgcaataacctctgcttcactcctttgaaatgtaagaatatgctttcagtgttggcatgcctgtttcttgataaacttctcagccacaccagaacagaggttctccaacaggtcttctgagaaaatctttttagcatttgccgtcttcagcccagagacattgccaacagattattgtgtgaccaaaaaagtaaattctcaacacaactactatttgttcttgaaatttttagtgtcttttatataattcttattttgttaatggacaaatatcaagagaattcacaactatagcacaagggctctctgtcaatccatcctatgttctttactactatatttgattgtctttgatccaacttccaccattgacccaagaatatgcatctctgggtgagcaatttttaaatgtttggttagcaaactgtgcagtgaatattttccatcaggtaaaatgcaatttttatatattttaaaatatttttacaaataaatcaaacgtttatttatacacagatttctcatatacaggatgactcaatttgcatgaatcccttagtagccactctcagaatggcttcatgtgcctcagaacttccttttgcctgagtttcctttgtttaaatatttgcagaacctttgtgtaaatcacttgaacccatcaatgaggataagcctatatttcccagcgtatgaagggcttggtccctaaagtgatatcactgaagtatgatgtagcctattacaagtattaagaaatgatgatgcctatgtaaaaaacacatttttcgaacaggggttacacctatcatcacctatcatagcaaatatctatatagacaaaatatatttcttttgactctaagctacttcaggttgaatgccaattatgaccttttgtagtagaaatacaaccactctagaggtccttaccttctttttgcatgcttacctttgattgtccaaggaatcaacttgaaaaattgcttctacttccactagatctgatctttggatcatagtctggatgatcctctcaaaacttgtgtagaggaccatggggaactctacttaaacatagcagcatagagagcacctaaaggagaattttgcaaagaaaataaggggccaaaagtccatattattggctgctaaaccagaggatcaacattgaagcaatgagaaatatatactatcagttccttcatcatattaaaacctccaaatataaccatctaaccgagaccatctcacaagcacatggtcagtgttactaatatgaatacaaacacagtaatgtgtcataatgttagaggagaaaactctatccttctaaccctgaatatcaaagatataaagaataactgagttcttcctgtttacaggattttcacatgatcagaagttgtactgtgcattactcaattatggtacaagtgtaaaaggaaaccactgtgtggtcctctagattgccaacataattttaatgagaaacagataagtgattattaaggaaattttccatgctttatgtaataacgttgcagtctgagtggatctgagtctcttgagagtgctctcacataatctatccatgaatctttaaaatgatgtaactaatgagtagtcatgagagttacgtagtggagatacttaaacaaaatgtcactgatatccttttttcacttcatgtgtttgcctgacactttcttctatgtcctgctcttgtttctttgtcaacatgattgtatttcttggctctctagacttatttttgcgtagtgaattatcatctgaaaaataggacccttaaataaaaacatttctagatcaacatcttcattgaagcatattatgagaaaactactagagaatcatagaccattgcacacttaatagtatagatgaacctcatttagttgatatactagaaaatgcatgggattcatttaaggtctcaagggtcttttttttttttctttttttgtcggagctggggaccgaacccagggccttgtcttgctaggcaagagctctaccactgagctaaatccccaaacctcacagggttcttaatacttttttttgctctaacaactttcttctctagagatctatctggatgagtctagtattccctgtagtaaaaatagctaaaaggtattaaaataaaaattaaaaaaacatatctgacaatttcacactcaaaaatattcctcttaatatttgtatttaaagtggagacaatataaaagtgtatttcgtttgtgttgaacctttctttaagttaagcatcccatgtgttcatgtccatgcatggatgagttggaatataaggaaagaacggattttctcctctcacaaggatttagttaaaattaatagtgaattttcacacatcactcaacggaagagaatttcgtcttcatttgtggctagacccaaaagttagtcctgtgctttaggtccagacaacactggccctatgatcagccttgcattgattaatacaaaatctatattgcatacatgccagctgactcctcaaagctatgtacttttccaaagtattggaaccactcttttctctgtgtcctgtctcacttactggaatgtaaaagagctcatgtgaagttcagattaatgttaaaagtgaatcattcatttctccttaggtggtggctggaaccaaatttttctttgatgtgattctaggcaaaacaatatgtttgaagacacagggtgacttgaccaactgtcccttaaatgaagaggctgatcagcaggaggtatggatataacacatgccaaagacattttgttcaagtagagggatgtgcaagcttgtaagtttgtgaaagtatatttgtggtaatattcatacacaattacaatatttacaaacagggaagaaagtgtgtgtgtgtgtgtgtgtgtctgtgtgtgtgtgtgtgtgtttgtgtgtaagtaatttaaagtgtgtttggactattcttgggaagaattggaaatagtatataagtgacactgggagaaatgtgtatgtgtaagtaggttgaacttaattaagaatgcattcattaagaattgacagtatatgtagcagacaaggggaacaatatatctagacataaaaaattagagaactgtgaattctgtactctgagatgactgtagttttgcttggttgaaatggaagaggcaataatagtttgcatttttgagaagagatgtttacacctataagggaagcttttgtccacattacccctaaaggaaacgagtccttcagtgctgctctttacactcaatgctggcttatcccctgatagtggcacactggagatacagtgaatttgtgtaaagtggcaattcctcttcatatcactttccctactatgaagctttcagggatttctgtatcccatgagcctgaaggtcccctgtgtgggagtgagagggtcctatgtacagaatgtatgctatattcttgacttctgagatcctagaatgagtcatagggtattctaaaagggatgttttgacaaaaaggaaaagtctgttgcccttaaaggtagacagatatcatatggtggatggacataattatgttgtagatcatcagacactacgtaagaaggctgagtgttgttatactgggcagagggttgttttacattccccagtcaaattttgtcaaacagctctagcttcaaatttcttcctaaatttttccagcactgaacaaccttgtttgtttacttttctagcatgaattctgctctttcgtggttcatgatatcccatgggagaattatattgtcttgctgagctccagctgtcatagtatatgaattagtgtcaagtgttactgtgtaggatgcagatgtctctggcaatgcctcatcactccagtggatgatctttccttgatggatgcttaccagcatggatattagcaatggaatagactgctgtgcacttagagttagacccaagcacctctccctttattcttcctctacaaatgcccatatttgcttgctcattccttgctcaataaaatgtccaacagctcctttgtgtgactcgaatttcagtctatctaacattgtggtattgaaaacacctaatgagggctcacatccatatgtgtacagcaagcaaaaggccttatgacactgatattctctaaaatgaagagtagataaagaatgtaaagtgaataaaacaaaacaattttttgacacagtgggtcttagcagagagacggtataaaaggggactgtgggaagtcctcatgtagattgcctgtgtgctttggtcc

SEQ ID NO: 2221 - DNA, 1749 bp, Rattus norvegicus
  ref <308>: DATABASE ACCESSION NUMBER: Refseq / NM_022512
  ref <309>: DATABASE ENTRY DATE: 2003-01-13
gtcaggaggtcccggaggtctgtgcccatggccatggccgctgcgttgctcgcccgggccggtggctctctcggcagagctctccgcgctcgagattggcgaagattacatactgtttaccagtctgtggaactacctgagacacatcagatgttgcgccagacatgccgggactttgctgagaaggagctggtccccatcgctgcccagctggacaaggaacatctcttccccacatcgcaggtgaagaagatgggggagctcgggctgctggccatggatgtgccagaggagctgagtggtgctggcctggattacctggcctactcgatcgccctggaggagatcagccgtggctgcgcctccaccggagtgatcatgagtgtcaacaactctctctacttgggacccatcctgaagttcggatcctcacagcagaagcagcagtggatcacccctttcaccaacggtgacaaaatcggctgttttgccctcagtgagccaggcaatggcagtgacgcgggggccgcttccaccactgcccgggaagagggtgactcctgggtcctcaacggcaccaaagcctggatcaccaactcctgggaggcttctgccacggtggtgtttgctagcaccgacaggtcccggcagaacaagggtatcagcgctttcctggttcccatgccaactcctgggcttacgctgggcaaaaaggaagacaagctgggcatccgggcctcatctacagctaacctcatctttgaggactgtcgcatccccaaggagaacctgctcggcgagcctgggatgggcttcaagatagccatgcaaaccctggacatgggccgcattggcatcgcctcccaggccctgggtattgcccaggcctccctggattgtgccgtgaagtacgccgagaaccgccatgcctttggggcacccctcacaaagctccaaaacatccagttcaagctggcagacatggccctggccctggagagtgcccgcctgctgacctggcgcgccgccatgttgaaggacaataagaagcctttcaccaaggagtcggccatggccaagctggctgcatcagaggctgctactgccattagccaccaggccatccagatcctgggcggcatggggtacgtgacagagatgccagccgagcgctactaccgagatgcccgcatcactgagatctatgaaggtaccagcgaaatccagagactggtgattgccgggcatctgctccggagctaccggagctgagcccccgcccttcttgggaacttgccagcctgctcagaccatgaagggacctgcctcggtcagcctttctgcccctcactgtagcccccagtcagactaggggaaagtctgtctcagggagagggaaggtcaaccgctgtgacctgtcagctcagaatggggcggcgtggctacctctttaccccccaccaacagtgcctctctctttgagcgacctgctggaggcagggccacagagacctgaatgaccctggccctcccaatgcggatgccgttcccaagagtcctcagaggcaagaacaggaggggcagggcggggtgaggaggggaaggggatggcccagtgcttgagtccccagggttgtcgtgggaaggctggggaaccggatcatagggccctggctagaggtcaagtggccgcaggtggttctgtggctgtagagctgcctgtggtcaataaagctcacctgtgtcctg

SEQ ID NO: 2222 - protein, 414 aa, Rattus norvegicus
  ref <308>: DATABASE ACCESSION NUMBER: Refseq / NP_071957
  ref <309>: DATABASE ENTRY DATE: 2003-01-13
MAMAAALLARAGGSLGRALRARDWRRLHTVYQSVELPETHQMLRQTCRDFAEKELVPIAAQLDKEHLFPTSQVKKMGELGLLAMDVPEELSGAGLDYLAYSIALEEISRGCASTGVIMSVNNSLYLGPILKFGSSQQKQQWITPFTNGDKIGCFALSEPGNGSDAGAASTTAREEGDSWVLNGTKAWITNSWEASATVVFASTDRSRQNKGISAFLVPMPTPGLTLGKKEDKLGIRASSTANLIFEDCRIPKENLLGEPGMGFKIAMQTLDMGRIGIASQALGIAQASLDCAVKYAENRHAFGAPLTKLQNIQFKLADMALALESARLLTWRAAMLKDNKKPFTKESAMAKLAASEAATAISHQAIQILGGMGYVTEMPAERYYRDARITEIYEGTSEIQRLVIAGHLLRSYRS

SEQ ID NO: 2223 - DNA, 1829 bp, Homo sapiens
  ref <308>: DATABASE ACCESSION NUMBER: Refseq / NM_000017
  ref <309>: DATABASE ENTRY DATE: 2002-05-03
gggattcgggcctgggactgtgtctgtcgcccatggccgccgcgctgctcgcccgggcctcgggccctgcccgcagagctctctgtcctagggcctggcggcagttacacaccatctaccagtctgtggaactgcccgagacacaccagatgttgctccagacatgccgggactttgccgagaaggagttgtttcccattgcagcccaggtggataaggaacatctcttcccagcggctcaggtgaagaagatgggcgggcttgggcttctggccatggacgtgcccgaggagcttggcggtgctggcctcgattacctggcctacgccatcgccatggaggagatcagccgtggctgcgcctccaccggagtcatcatgagtgtcaacaactctctctacctggggcccatcttgaagtttggctccaaggagcagaagcaggcgtgggtcacgcctttcaccagtggtgacaaaattggctgctttgccctcagcgaaccagggaacggcagtgatgcaggagctgcgtccaccaccgcccgggccgagggcgactcatgggttctgaatggaaccaaagcctggatcaccaatgcctgggaggcttcggctgccgtggtctttgccagcacggacagagccctgcaaaacaagggcatcagtgccttcctggtccccatgccaacgcctgggctcacgttggggaagaaagaagacaagctgggcatccggggctcatccacggccaacctcatctttgaggactgtcgcatccccaaggacagcatcctgggggagccagggatgggcttcaagatagccatgcaaaccctggacatgggccgcatcggcatcgcctcccaggccctgggcattgcccagaccgccctcgattgtgctgtgaactacgctgagaatcgcatggccttcggggcgcccctcaccaagctccaggtcatccagttcaagttggcagacatggccctggccctggagagtgcccggctgctgacctggcgcgctgccatgctgaaggataacaagaagcctttcatcaaggaggcagccatggccaagctggccgcctcggaggccgcgaccgccatcagccaccaggccatccagatcctgggcggcatgggctacgtgacagagatgccggcagagcggcactaccgcgacgcccgcatcactgagatctacgagggcaccagcgaaatccagcggctggtgatcgccgggcatctgctcaggagctaccggagctgagcccgcggcggactgccccaggactgcgggaaggcgcgggagccaggggcctccaccccaaccccggctcagagactgggcggcccggcgggggctccctggggaccccagatgggctcagtgctgccacccagatcagatcacatgggaatgaggccctccgaccattggcagctccgcctctgggcctttccgcctcctcaccactgtgcctcaagttcctcatctaagtggccctggctcctgggggcggggttgtgggggggctgagcgacactcagggacacctcagttgtcctcccgcgggccctggtgccctggcatgaaggcccagtgcgacaggcccttggtggggtctgtcttttccttgaggtcagaggtcaggagcagggctggggtcaggatgacgaggcctggggtcctggtgttgggcaggtggtggggctgggccatggagctggcccagaggcccctcagccctttgtaaagtctgatgaaggcaggggtggtgattcatgctgtgtgactgactgtgggtaataaacacacctgtccccc

SEQ ID NO: 2224 - protein, 412 aa, Homo sapiens
  ref <308>: DATABASE ACCESSION NUMBER: Refseq / NP_000008
  ref <309>: DATABASE ENTRY DATE: 2002-05-03
MAAALLARASGPARRALCPRAWRQLHTIYQSVELPETHQMLLQTCRDFAEKELFPIAAQVDKEHLFPAAQVKKMGGLGLLAMDVPEELGGAGLDYLAYAIAMEEISRGCASTGVIMSVNNSLYLGPILKFGSKEQKQAWVTPFTSGDKIGCFALSEPGNGSDAGAASTTARAEGDSWVLNGTKAWITNAWEASAAVVFASTDRALQNKGISAFLVPMPTPGLTLGKKEDKLGIRGSSTANLIFEDCRIPKDSILGEPGMGFKIAMQTLDMGRIGIASQALGIAQTALDCAVNYAENRMAFGAPLTKLQVIQFKLADMALALESARLLTWRAAMLKDNKKPFIKEAAMAKLAASEAATAISHQAIQILGGMGYVTEMPAERHYRDARITEIYEGTSEIQRLVIAGHLLRSYRS

SEQ ID NO: 2225 - DNA, 2328 bp, Rattus norvegicus
  ref <308>: DATABASE ACCESSION NUMBER: Refseq / NM_022691
  ref <309>: DATABASE ENTRY DATE: 2003-01-14
tcaggtgtagctgcatgctctgaacacagacactcatgttcttcacctgctgaggtagccaagacatttccatcaggctcttggtgtgtcaagctttctgctgagtctgtgacatttaggtcctggacatgaactaccattgtggggacctttgggaagaggctcaaagggcttatgtcttaaatcaatatttgtttcctttttgtctggtcacatttgggctgttcgagctgccatgtcttggagcagggtttggagctaagacataggggagtgggaacagcgctgtccgctgcgatgattcccccgcaggaggcttccgctcggcggcgggagatcgaggacaagctgaagcaggaggaggagacgctgtcctttattcgagacagcctggagaagagcgaccagctcactaagaacatggtgtctatcctgtcgtcctttgagagccgactcatgaagctggagaactccatcatccctgtgcacaagcagacagagaacctacagaggctgcaggagaatgtcgaaaagaccttatcctgcctggaccatgttatcagctattaccacgtagccagcgacacggagaagatcatcagagagggccccacaggtaggctggaagaatacctgggaagcatggccaaaatccagaaggctgtggagtactttcaggacaacagcccagatagcccagagctcaacaaagtgaagctgctgtttgagcgggggaaggagtccctggaatcggagttccgcagtctgatgaccaggcacagcaaggtcatctcccctgtgctcgtcctggacctcatcagtgcggatgacgagctggaggtccaggaggacgtggtcctggagcacctgcctgagagcgtgctccaggatgtgatccgcatctcccgctggctggtggaatatggtcggaaccaagatttcatgaatgtctactatcagatccgctctagccagctggaccgctccatcaagggtctgaaggagcattttcgcaaaagcagttcttcctctggggttccctactcccccgccatccccaacaagaggaaagacacgcctaccaagaagcccatcaagcggccagggagagatgacatgctggacgtggagacagatgcctacattcactgcgttagtgcctttgtcaggctggcacagagtgaataccagctgctgatgggcatcattcccgagcatcaccagaagaaaaccttcgactccttgatacaggatgccctagatgggctgatgcttgaaggggagaacatagtgtccgcggccaggaaagccatcatccgccatgacttctccaccgtgctcaccgtcttccccatcctgcgacacctcaagcagaccaagcctgagtttgaccaggtgctccagggcacagcagccagcacgaagaacaagctgccaggcctcatcacctccatggagaccattggggccaaagctctagaagactttgcggataacatcaagaatgatccagacaaggagtacaacatgcctaaagatggcaccgttcatgagctcacaagcaatgccatcctgttcctacagcagcttctggacttccaggagacagcaggcgccatgctggcctcccaagaaaccagctcttcggccaccagctacaactccgagttcagcaagcgactgctgagtacctacatttgcaaagtcctgggtaacctgcagctgaacttgctaagcaagtccaaggtgtatgaggatccagctctgagcgccatcttcctacacaacaactacaactacatcctcaagtccctggagaagtctgagctgatccagcttgtggctgtgacccagaagactgctgagcgctcctaccgggagcacattgagcagcagatccagacctaccagcgcagctggctaaaggtgactgactacatcgcagagaagaatctacctgtgttccagcctggagtcaagctccgggacaaggagcggcaaatgattaaggaacgtttcaagggattcaatgatgggctcgaagaactgtgcaagattcagaaggcctgggccatcccagacacggagcagagggacaagatccgacaggctcagaaaagcatcgtcaaggagacctatggggcctttctgcacaggtatagcagcgtgcccttcaccaaaaacccggagaagtacatcaagtaccgtgtggagcaggtgggcgacatgatcgaccgcctcttcgacacctctgcttaagtcggccagcgcttccgcccagtgccactggcgtgcctagcatgtcatcggactcataaaccagtggta

SEQ ID NO: 2226 - protein, 653 aa, Rattus norvegicus
  ref <308>: DATABASE ACCESSION NUMBER: Refseq / NP_073182
  ref <309>: DATABASE ENTRY DATE: 2003-01-14
MIPPQEASARRREIEDKLKQEEETLSFIRDSLEKSDQLTKNMVSILSSFESRLMKLENSIIPVHKQTENLQRLQENVEKTLSCLDHVISYYHVASDTEKIIREGPTGRLEEYLGSMAKIQKAVEYFQDNSPDSPELNKVKLLFERGKESLESEFRSLMTRHSKVISPVLVLDLISADDELEVQEDVVLEHLPESVLQDVIRISRWLVEYGRNQDFMNVYYQIRSSQLDRSIKGLKEHFRKSSSSSGVPYSPAIPNKRKDTPTKKPIKRPGRDDMLDVETDAYIHCVSAFVRLAQSEYQLLMGIIPEHHQKKTFDSLIQDALDGLMLEGENIVSAARKAIIRHDFSTVLTVFPILRHLKQTKPEFDQVLQGTAASTKNKLPGLITSMETIGAKALEDFADNIKNDPDKEYNMPKDGTVHELTSNAILFLQQLLDFQETAGAMLASQETSSSATSYNSEFSKRLLSTYICKVLGNLQLNLLSKSKVYEDPALSAIFLHNNYNYILKSLEKSELIQLVAVTQKTAERSYREHIEQQIQTYQRSWLKVTDYIAEKNLPVFQPGVKLRDKERQMIKERFKGFNDGLEELCKIQKAWAIPDTEQRDKIRQAQKSIVKETYGAFLHRYSSVPFTKNPEKYIKYRVEQVGDMIDRLFDTSA

SEQ ID NO: 2227 - DNA, 3472 bp, Homo sapiens
  ref <308>: DATABASE ACCESSION NUMBER: EMBL / AK022552
  ref <309>: DATABASE ENTRY DATE: 2002-08-06
gacaaagaacaagctgcctggcctcatcacatccatggagaccatcggtgccaaagcgctggaggacttcgcagacaacatcaagaatgacccggacaaggagtacaacatgccgaaggacggcaccgtacacgagctcaccagcaatgccatcctcttcctgcagcagcttttggacttccaggagacggcaggcgccatgctggcctcccaagagaccagctcttcggccaccagctacagctctgagttcagcaagcggctgctaagcacctatatctgtaaagtgctgggcaacctgcagttgaacttgctgagcaagtccaaggtgtacgaggacccagctctgagcgccatcttcctgcacaacaactacaattacatcctcaagtccctggagaagtctgaactgatccagctggtggcagtgacacagaagactgctgagcgctcctaccgggagcacattgagcagcagatccagacctaccagcgcagctggttaaaggtgactgattacatcgcagagaagaatctacctgtgttccagccgggagtcaagctccgggacaaggagcggcagattatcaaggagcgttttaagggcttcaatgatggcctcgaagaactgtgcaaaatccagaaggcctgggctattccagacacagagcagagggacaggattcgccaggcccagaagaccattgtcaaggagacctacggggcctttctacagaagtttggcagcgtgcccttcaccaagaacccggagaagtacatcaagtacggggtggagcaggtgggcgacatgatcgatcgccttttcgacacctctgcctgagcctgctgctagccctgcctggttccaccagactggcgtgtcattggacagataaaccagtgttagcttgcctctgggctgggtgagcttgaagtcctctgggacagagacctgtctccacgcctccgggagctgtgtccctgagccccctagtcctggctcctgctttttccccacagcccgtgttcccagccgaaccagcactctcccggaagcctggggtccctccacaccttggcttttatgaccctgatggcttctgaaacaggaaaagagagaaggaagacagaggcctgtgcccactgctgctccatgtgtaccaagagcagcagggcagaagggccctccctccagcctaggtcagaggtggggacagagaactcccctacagcccagagatgtggcagggctcagagaagcagccagagctcctggaggaaaggcagtcgggactgaccccctctcttaaaacacattcccgcccgcccacaggcctgaggtctgggacctttccctcccaggagtcccctaggtggctgggggaggcaggctcactggccattttccctagagtccagcacactgcaggaggcgttcggaggaggagttccgccccaccctctacagcctccctcaggcccctgtctctggtccccagcctcagtgcctcttggcccagggccaggcagtcgtggttgcagaaggagcaattaggctgcctgcctgtgggctgggagacagggacaatggggaaaagttaaggagcaaaatgggggttggaagcaaaaaataggaccccacctatttaggacgagattgaagactgacccttgaggcacacttgcactggagatgggtttatttcacgctctgtgcttgtgtgctagcggagggagagcttagggtggcttaatccagaggccctgtcatggcccgcccccagccatgggaaagcaaacttcatcctaaggtgtgcagcccaggccctgcccctttacagtctaggccgcctgccatggggtgcagcctctccaggggctgcgtcagacttgcacgctgcccacatccagattcctgcaaagacgaattgggtgcacagcaccccaaccacatacacgaggaagaagatgcggtcagcagtctcaggccagcttctctgtgacccctttactcctctggagggctctgtggggagagatacagggaaaggagctgttcttcaaggtcccctcaacatgagcggaagagcgaaccccaggggtcatcagcctgtatcgcttcctttcttagattctcagctgatgaaaatttgggtctggcccatttcaggccatcttcagttgaagaaacaccctcttaggctgtgcaaggcatgggttatcaggggattgaggtcacctgggacttcagggaggctcagcttgctccctgccccagacctgtttcttctaagggaggaggacatggtggagaccagggacaggagagccagcagggtggatgcaaggggcctctacccacacctggacctccgtgccctcaccccagccctaggtgtgcacctaggcctcattccttaccccccagcccctgcccaccttcagcaggatgaggccctgggttgccgtgctctcgctgttcccctctcggggctgggctggggccgctcttggccccaaggttgccccgggccagcagcccagccagcagcacagtctctatggtgctgaggaagagcagcagcagcaggatggtgaagtagtaaactgggggaggcagggcacagggagatgctcaggggccagtccctgtgtctctggtgcccagcgagctgagcaccagtgggtgaccggggagaaacagggcagactgggtaagggagcagggcttactgagcagtgggttgcaggaggaggagctgggcagggcctgcaccagggaggagtggaggacgaggtaactcagcagcaatgtcaccttgtagcctatgcgctcaatggcccggaggggcagcaaccccccgcacacgtcagccaacagcagtgcctctgcaggcaccaagagagcgatgatggacttgagcgccgtgttcttcagcctcagctggaaggggaaaagtcagggccttcccggcgggggggaaggaggtgggcatcgggggcatggggcctggcctctggccgtgcatcctcactcccacccgcctccagcagccctctgtcggcctcctcgcgacttgactcaccgtcacctggaagcagggcaccagctgctggggtgggacttgggtcttcagatcataaactacgtattccctcttgacactcacaatctcgttcaccacgtgggcctggaactctaactccatcgctgaggggtgggaatgagaactatgaaccaggaaggagagatcccagctgccaagtctgggggtagcagactggagcccaggggtgatggagacttttgatggcttttggcagggacagacttggacacaaaaccgatccatagaagggcttcccaaaccttgttttgcaacatcccaaattgtctccagttgaaggaaggcctttatcagattcatagatgagctttcattgtaaaaataaatgtactttgcaccacttc

SEQ ID NO: 2228 - protein, 268 aa, Homo sapiens
METIGAKALEDFADNIKNDPDKEYNMPKDGTVHELTSNAILFLQQLLDFQETAGAMLASQETSSSATSYSSEFSKRLLSTYICKVLGNLQLNLLSKSKVYEDPALSAIFLHNNYNYILKSLEKSELIQLVAVTQKTAERSYREHIEQQIQTYQRSWLKVTDYIAEKNLPVFQPGVKLRDKERQIIKERFKGFNDGLEELCKIQKAWAIPDTEQRDRIRQAQKTIVKETYGAFLQKFGSVPFTKNPEKYIKYGVEQVGDMIDRLFDTSA

SEQ ID NO: 2229 - DNA, 2421 bp, Rattus norvegicus
  ref <308>: DATABASE ACCESSION NUMBER: Refseq / NM_134404
  ref <309>: DATABASE ENTRY DATE: 2003-01-13
tatgcacatgcctagcatgtctgagatcctggaacttaggagtatcactcctgtgaggtgcacatgcctagcatgtctgagatcctggaacttaggagtatcatcacttctgtgatatgcacatgcctagcatgtcggcggagcggctggctttgtctcccgggcagggctccctcccccagcagctgcccagcgaggaagccgcggagctgtccagcatcccggtgctgaaagccggagcgccggccctgcttcaccatgtaagggtcatgcccaggctcgccctggcgcagcgcggacatggaggaggacctgttccagctcaggcagttgccggtggtgaaattccgccgcacaggagagagcgcacggtcagaggacgacgcggcttccggggaacatgatgttcagattgagggggtccgagtgggcctagaagctgtcgagctggatgatggagcagctgtccccaaggagtttgccaatcccactgatgacactttcatggtcgaagatgcggtggaagccattgggttcggaagattccagtggaagctctctgttctcaccggcttggcttggatggcggacgccatggagatgatgattctgagcatcctggcgcctcagctgcactgcgagtggcgactccccagctggcaggtggcgctgctgacttcggtggtcttcattggtatgatgtccagttctacgctctggggaaacatctcggatcagtatggcaggaaaacagggctgaagatcagtgtgttctggaccctgtactacggcatcctcagcgctttcgcgccagtgtatagctggatcctggtgctccgaggcctcgtgggctttgggattggaggggtgcctcagtcggtgaccctgtacgccgagttcctccccatgaaggccagagccaagtgcattttgctgattgaggttttctgggccatcgggaccgtgttcgaggtgcttctggctgtgtttgtgatgcccagcctgggctggcgctggctgctgctgctgtcggccgctccactacttgtctttgctgttctgtgtttctggctgccagagagtgctaggtacgatgtgctgtctgggaaccaggaaaaggcgattgctaccttaaagcggatcgcaacagaaaatggagcccccatgcctctggggaagctcatcatctccagacaggaagaccgaggcaaaatgagggaccttttcacaccccactttcgttggacaactctgctgctgtggtttatatggttctccaatgccttctcttattacggcttggttctgctcaccacagaactcttccaggccggagatgtttgcagcatctccagccggaagaaggcggtggaagccaaatgcagcctggcttgtgagtacctcagcaaagaggattacatggacctgctgtggaccaccctgtctgagttcccaggtgtccttgtgactctgtgggtcatcgaccgcctgggccgcaagaagaccatggctctgtgtttcgtcatcttttccctctgcagcctcctgctgttcatctgcattggaagaaatgtgctaaccctcttactgttcattgcaagagcgtttatttctggaggcttccaagcagcctacgtttacacgcctgaggtgtatccaacggcgacgagggcgctgggcctgggcacctgcagcggcatggcgagagtgggcgcgctcatcactccattcatagctcaggtgatgctggaatcttccgtgtacctgaccctggccgtctacagtggctgctgcctccttgctgccttggcctcctgctttctgcccatcgagaccaaaggccgagcactgcaggagtccagccaccgggagtggggccaggagatggttggccgagggacaaacagcacaggcgtccccaggtcgaactctggctctcaggagtagtgacccctgggagttgagctggtctttgaggccggagcctagaaagctggcagagcccagctgggccactaacggtcactgccgacatcaagaactttccccgagtgggcgaagtggaccgacagggttttgtgtcttcactgtgtttggcctatgttcatcgagggttgcccgccccaggaagatggggctgcattcactccagggggttctccgtggtgggggaaggtttgtacgtcgccgtggatctgcatgggggaagctgctagtgtgggagggtcccagggcgctcagggccagctgagcagatgtcacgtggttacccagtcatacccttggagagccactgtccaaagatctccatagatacagtctcagcccagacccctgtgacacccgccattttgtccagtaagtttctcctgcaccctggccccaggatgtctttggaattaagacaagctaattagtgtc

SEQ ID NO: 2230 - protein, 548 aa, Rattus norvegicus
  ref <308>: DATABASE ACCESSION NUMBER: Refseq / NP_599231
  ref <309>: DATABASE ENTRY DATE: 2003-01-13
MEEDLFQLRQLPVVKFRRTGESARSEDDAASGEHDVQIEGVRVGLEAVELDDGAAVPKEFANPTDDTFMVEDAVEAIGFGRFQWKLSVLTGLAWMADAMEMMILSILAPQLHCEWRLPSWQVALLTSVVFIGMMSSSTLWGNISDQYGRKTGLKISVFWTLYYGILSAFAPVYSWILVLRGLVGFGIGGVPQSVTLYAEFLPMKARAKCILLIEVFWAIGTVFEVLLAVFVMPSLGWRWLLLLSAAPLLVFAVLCFWLPESARYDVLSGNQEKAIATLKRIATENGAPMPLGKLIISRQEDRGKMRDLFTPHFRWTTLLLWFIWFSNAFSYYGLVLLTTELFQAGDVCSISSRKKAVEAKCSLACEYLSKEDYMDLLWTTLSEFPGVLVTLWVIDRLGRKKTMALCFVIFSLCSLLLFICIGRNVLTLLLFIARAFISGGFQAAYVYTPEVYPTATRALGLGTCSGMARVGALITPFIAQVMLESSVYLTLAVYSGCCLLAALASCFLPIETKGRALQESSHREWGQEMVGRGTNSTGVPRSNSGSQE

SEQ ID NO: 2231 - DNA, 996 bp, Homo sapiens
tggctgcctgaaagtgcaaggtatgatgtgctgtcagggaaccaggaaaaggcaatcgccaccttaaagaggatagcaactgaaaacggagctcccatgccgctggggaaactcatcatctccagacaggaagaccgaggcaaaatgagggaccttttcacaccccattttagatggacaactttgctgctgtggtttatatggttttccaatgcattctcttactacgggttagttctactcaccacagaactcttccaggcaggagatgtctgcggcatctccagtcggaagaaggctgtagaggcaaaatgcagcctggcctgcgagtacctgagtgaggaggattacatggacttgctgtggaccaccctctctgagtttccaggtgtccttgtgactctgtggattattgaccgcctggggcgcaagaagaccatggccctgtgctttgtcatcttctccttctgcagcctcctgctgtttatctgtgttggaagaaatgtgctcactctgttactcttcattgcaagagcgtttatttctggaggctttcaagcggcatatgtttacacacctgaggtctaccccacggcaacgcgggccctcggcctgggcacctgcagcggcatggcaagagtgggtgctctcatcactccgttcatcgcccaggtgatgctggaatcctctgtgtacctgactctggcagtttacagtggctgctgcctcctggctgccctggcctcctgctttttgcccattgagaccaaaggccgaggactgcaggagtccagccaccgggagtggggccaggagatggtcggccgaggaatgcacggtgcaggtgttaccaggtcgaactctggctctcaggaatagtgaccgatgggggactgagctggtctttgaggctgcagagcttggggggctggcaggccccaactggggcactgattgtcactgccgacatcaagaactcacccaagagtatgacct

SEQ ID NO: 2232 - protein, 260 aa, Homo sapiens
MPLGKLIISRQEDRGKMRDLFTPHFRWTTLLLWFIWFSNAFSYYGLVLLTTELFQAGDVCGISSRKKAVEAKCSLACEYLSEEDYMDLLWTTLSEFPGVLVTLWIIDRLGRKKTMALCFVIFSFCSLLLFICVGRNVLTLLLFIARAFISGGFQAAYVYTPEVYPTATRALGLGTCSGMARVGALITPFIAQVMLESSVYLTLAVYSGCCLLAALASCFLPIETKGRGLQESSHREWGQEMVGRGMHGAGVTRSNSGSQE

SEQ ID NO: 2233 - DNA, 579 bp, Rattus norvegicus
  ref <308>: DATABASE ACCESSION NUMBER: EMBL / AA800298
  ref <309>: DATABASE ENTRY DATE: 2000-03-03
acccggaaaaagatgtctttatgttcttacatggaaaaggatatcggggtctatagcatgatgatacagacttttcataaaattcatctcaacgaatctgtttcagctgcagtcataattcaagacttgtcaaatggaaatcttaagatcggcgcaggggatgggaagggggagcgttgggggaaggtcaagattctgtgctgcttcttcctagaattttaacttcccagcgagtcaggcttacatcggcagatgccgcactcaactatgactgggtagacaggcagaaccctacagcatgaaggcaataatgttttaggggaccatattaagtcccgatatcggaggaaacatgagcaggatctttggagcagctctctttctctggatgtatggaaccgtgcgtggtatcgccaggcgcttggttcacacatttcttagggagggagctatgtctcacatatctaaaaggtgatgctgttagcaagcgcaaaggacatcttaccctcgacagccagggttggaaggaaggaatggctttctgaagaacgcacggggcaaccatgccggcccctgttt

SEQ ID NO: 2234 - DNA, 1821 bp, Rattus norvegicus
  ref <308>: DATABASE ACCESSION NUMBER: Refseq / NM_017210
  ref <309>: DATABASE ENTRY DATE: 2002-11-05
ggtcggagaaggtgaagggcccccgggggcttcggggcccgcggccaccatgctgcgctccctgctgcttcactctctgaggctctgcgcccagaccgcctcgtgcctcgtgctgttcccgcgcttcctaggcacggccttcatgctctggcttttagatttcttgtgcatccgcaagcatttcctgcgccgtcgtcatcctgaccaccccgagcccgaagtagagctcaacagtgaaggtgaggagatgccccctgacgacccacccatctgcgtatccgacgacaaccggctgtgcaccctggcctctctcaaggccgtgtggcatggccagaagttggatttcttcaagcaggcccatgagggtggcccagcacctaactcggaggtcgtccggcctgatggcttccagagccagcgcatcctcgactacgcacaagggacccgcccgttggtgctcaattttggcagctgtacctgaccaccgttcatggcgcggatgagcgccttccagcgcctggtcaccaagtaccagcgcgacgttgacttccttatcatctacatcgaggaagcccacccatccgatggctgggtcaccacagattcaccctacgtcatcccacagcaccgcagcttggaggaccgtgtcagcgcagcaagagtacttcagcaaggcgcacctggctgtgctctggttctggacacgatggccaactccagcagttccgcatatggtgcctattttgagcgcctctacgtcatccagagcggcaccatcatgtaccagggaggccgtggccccgacggttaccaggtgtctgagttgcgcacttggttggagcgctatgacgagcagttgcatggtactaggccacgtcgactctaaaaaaccaagggacaagtgactgaattggtgggctgggtcttctgggccttcgaagctcatgtgcgaatgctccaaaagaagtcaaggttttcaggggtcccgtgacacagatgagcacagccacagaactcaggctgagtctggctaacttgagactctgctatagtgactcccttttggtactttttggcttgctttctggagcattgctgtggctcgaactggcaactttgtccctgctgaagtttacctgctggactttctgacacctgctccccagcgctatttcagcaaagcgcaataagtcgccagcatctcacagctcgggacttgttggccacgcccgcgcgccctgagcgcagctgggttccagcagcgcctccggctctagctagttgcctggcacccacctgtcgagagcagggagtcctgctgcttttgtgtttatttcttatccctgggttgggggaggggctcaagataaagggtgggcagggtaatttccccgcctagctttaggtgcgctggaaccctggctgctgatgacgaaccgcctctaactgggcttgaccacgggtcggctctgaattgcagaggggctcgaaacagcgcctaaagtaagagggggaaagtgctctgggttccacggggaaccgtcaaaaacagggtgaaagagggacatggtaaggggtgggcttcaggaccaaaggaagcggcttggggcactggcgaggttcgcaggtccccaagagggaggctaggactccttggagaagggattaattggttcgaagacaaggagatggggaagagcctgggagtcctaagcagaaagagcgggttgtggggtggggtgaaaaccagtcagtgaatgttgtgttggaaacgttccttgtgtataaacttttaagttacaataataaagacttgaagga

SEQ ID NO: 2235 - protein, 278 aa, Rattus norvegicus
  misc_feature (1)..(278): Xaa=Unknown amino acid
  ref <308>: DATABASE ACCESSION NUMBER: Refseq / NP_058906
  ref <309>: DATABASE ENTRY DATE: 2002-11-05
MLRSLLLHSLRLCAQTASCLVLFPRFLGTAFMLWLLDFLCIRKHFLRRRHPDHPEPEVELNSEGEEMPPDDPPICVSDDNRLCTLASLKAVWHGQKLDFFKQAHEGGPAPNSEVVRPDGFQSQRILDYAQGTRPLVLNFGSCTXPPFMARMSAFQRLVTKYQRDVDFLIIYIEEAHPSDGWVTTDSPYVIPQHRSLEDRVSAARVLQQGAPGCALVLDTMANSSSSAYGAYFERLYVIQSGTIMYQGGRGPDGYQVSELRTWLERYDEQLHGTRPRRL

SEQ ID NO: 2236 - DNA, 454 bp, Rattus norvegicus
  ref <308>: DATABASE ACCESSION NUMBER: EMBL / AA892036
  ref <309>: DATABASE ENTRY DATE: 2000-03-03
agctgtgttgacctgtctacctggtgttacctctgtcaggcatatgtccaccacgaggatgtccaagatgtgaagaacgctgcccaccagaacaagtctggggagggcatgccgcacttgcagtaaatcccagaccacgctgcctgtttaccttctgaggccccacacagagcagcttagctcactgcagtctgtaccttggaaggggtggcctcactttgacccgtcttgaatatcctttgcaaggtgcttatttaagtgcaaatccttttcagaggactctaatgtttggttttagatgtgcccctgcccactgcctgcatgaccgttctacccagatgggaagagggacaacttagtagccctaggaaggagctgagatcacaaggatgatgttgaaggagacaagtggcagtggtggcaggcctgcatatttaataaagttgaagttgtt

SEQ ID NO: 2237 - DNA, 4099 bp, Homo sapiens
  ref <308>: DATABASE ACCESSION NUMBER: Refseq / NM_006044
  ref <309>: DATABASE ENTRY DATE: 2001-02-26
gggcagtcccctgaggagcggggctggttgaaacgctaggggcgggatctggcggagtggaagaaccgcggcaggggccaagcctcctcaactatgacctcaaccggccaggattccaccacaaccaggcagcgaagaagtaggcagaacccccagtcgccccctcaggactccagtgtcacttcgaagcgaaatattaaaaagggagccgttccccgctctatccccaatctagcggaggtaaagaagaaaggcaaaatgaagaagctcggccaagcaatggaagaagacctaatcgtgggactgcaagggatggatctgaaccttgaggctgaagcactggctggcactggcttggtgttggatgagcagttaaatgaattccattgcctctgggatgacagcttcccggaaggccctgagcggctccatgccatcaaggagcaactgatccaggagggcctcctagatcgctgcgtgtcctttcaggcccggtttgctgaaaaggaagagctgatgttggttcacagcctagaatatattgatctgatggaaacaacccagtacatgaatgagggagaactccgtgtcctagcagacacctacgactcagtttatctgcatccgaactcatactcctgtgcctgcctggcctcaggctctgtcctcaggctggtggatgcggtcctgggggctgagatccggaatggcatggccatcattaggcctcctggacatcacgcccagcacagtcttatggatggctattgcatgttcaaccacgtggctgtggcagcccgctatgctcaacagaaacaccgcatccggagggtccttatcgtagattgggatgtgcaccacggtcaaggaacacagttcaccttcgaccaggaccccagtgtcctctatttctccatccaccgctacgagcagggtaggttctggccccacctgaaggcctctaactggtccaccacaggtttcggccaaggccaaggatataccatcaatgtgccttggaaccaggtggggatgcgggatgctgactacattgctgctttcctgcacgtcctgctgccagtcgccctcgagttccagcctcagctggtcctggtggctgctggatttgatgccctgcaaggggaccccaagggtgagatggccgccactccggcagggttcgcccagctaacccacctgctcatgggtctggcaggaggcaagctgatcctgtctctggagggtggctacaacctccgcgccctggctgaaggcgtcagtgcttcgctccacacccttctgggagacccttgccccatgctggagtcacctggtgccccctgccggagtgcccaggcttcagtttcctgtgctctggaagcccttgagcccttctgggaggttcttgtgagatcaactgagaccgtggagagggacaacatggaggaggacaatgtagaggagagcgaggaggaaggaccctgggagccccctgtgctcccaatcctgacatggccagtgctacagtctcgcacagggctggtctatgaccaaaatatgatgaatcactgcaacttgtgggacagccaccaccctgaggtaccccagcgcatcttgcggatcatgtgccgtctggaggagctgggccttgccgggcgctgcctcaccctgacaccgcgccctgccacagaggctgagctgctcacctgtcacagtgctgagtacgtgggtcatctccgggccacagagaaaatgaaaacccgggagctgcaccgtgagagttccaactttgactccatctatatctgccccagtaccttcgcctgtgcacagcttgccactggcgctgcctgccgcctggtggaggctgtgctctcaggagaggttctgaatggtgctgctgtggtgcgtcccccaggacaccacgcagagcaggatgcagcttgcggtttttgctttttcaactctgtggctgtggctgctcgccatgcccagactatcagtgggcatgccctacggatcctgattgtggattgggatgtccaccacggtaatggaactcagcacatgtttgaggatgaccccagtgtgctatatgtgtccctgcaccgctatgatcatggcaccttcttccccatgggggatgagggtgccagcagccagatcggccgggctgcgggcacaggcttcaccgtcaacgtggcatggaacgggccccgcatgggtgatgctgactacctagctgcctggcatcgcctggtgcttcccattgcctacgagtttaacccagaactggtgctggtctcagctggctttgatgctgcacggggggatccgctggggggctgccaggtgtcacctgagggttatgcccacctcacccacctgctgatgggccttgccagtggccgcattatccttatcctagagggtggctataacctgacatccatctcagagtccatggctgcctgcactcgctccctccttggagacccaccacccctgctgaccctgccacggcccccactatcaggggccctggcctcaatcactgagaccatccaagtccatcgcagatactggcgcagcttacgggtcatgaaggtagaagacagagaaggaccctccagttctaagttggtcaccaagaaggcaccccaaccagccaaacctaggttagctgagcggatgaccacacgagaaaagaaggttctggaagcaggcatggggaaagtcacctcggcatcatttggggaagagtccactccaggccagactaactcagagacagctgtggtggccctcactcaggaccagccctcagaggcagccacagggggagccactctggcccagaccatttctgaggcagccattgggggagccatgctgggccagaccacctcagaggaggctgtcgggggagccactccggaccagaccacctcagaggagactgtgggaggagccattctggaccagaccacctcagaggatgctgttgggggagccacgctgggccagactacctcagaggaggctgtaggaggagctacactggcccagaccacctcggaggcagccatggagggagccacactggaccagactacgtcagaggaggctccagggggcaccgagctgatccaaactcctctagcctcgagcacagaccaccagacccccccaacctcacctgtgcagggaactacaccccagatatctcccagtacactgattgggagtctcaggaccttggagctaggcagcgaatctcagggggcctcagaatctcaggccccaggagaggagaacctactaggagaggcagctggaggtcaggacatggctgattcgatgctgatgcagggatctaggggcctcactgatcaggccatattttatgctgtgacaccactgccctggtgtccccatttggtggcagtatgccccatacctgcagcaggcctagacgtgacccaaccttgtggggactgtggaacaatccaagagaattgggtgtgtctctcttgctatcaggtctactgtggtcgttacatcaatggccacatgctccaacaccatggaaattctggacacccgctggtcctcagctacatcgacctgtcagcctggtgttactactgtcaggcctatgtccaccaccaggctctcctagatgtgaagaacatcgcccaccagaacaagtttggggaggatatgccccacccacactaagccccagaatacggtccctcttcaccttctgaggcccacgatagaccagctgtagctcattccagcctgtaccttggatgaggggtagcctcccactgcatcccatcctgaatatcctttgcaactccccaagagtgcttatttaagtgttaatacttttaagagaactgcgacgattaattgtggatctccccctgcccattgcctgcttgaggggcaccactactccagcccagaaggaaaggggggcagctcagtggccccaagagggagctgatatcatgaggataacattggcgggaggggagttaactggcaggcatggcaaggttgcatatgtaataaagtacaagctgtt

SEQ ID NO: 2238 - protein, 1215 aa, Homo sapiens
  ref <308>: DATABASE ACCESSION NUMBER: Refseq / NP_006035
  ref <309>: DATABASE ENTRY DATE: 2001-02-26
MTSTGQDSTTTRQRRSRQNPQSPPQDSSVTSKRNIKKGAVPRSIPNLAEVKKKGKMKKLGQAMEEDLIVGLQGMDLNLEAEALAGTGLVLDEQLNEFHCLWDDSFPEGPERLHAIKEQLIQEGLLDRCVSFQARFAEKEELMLVHSLEYIDLMETTQYMNEGELRVLADTYDSVYLHPNSYSCACLASGSVLRLVDAVLGAEIRNGMAIIRPPGHHAQHSLMDGYCMFNHVAVAARYAQQKHRIRRVLIVDWDVHHGQGTQFTFDQDPSVLYFSIHRYEQGRFWPHLKASNWSTTGFGQGQGYTINVPWNQVGMRDADYIAAFLHVLLPVALEFQPQLVLVAAGFDALQGDPKGEMAATPAGFAQLTHLLMGLAGGKLILSLEGGYNLRALAEGVSASLHTLLGDPCPMLESPGAPCRSAQASVSCALEALEPFWEVLVRSTETVERDNMEEDNVEESEEEGPWEPPVLPILTWPVLQSRTGLVYDQNMMNHCNLWDSHHPEVPQRILRIMCRLEELGLAGRCLTLTPRPATEAELLTCHSAEYVGHLRATEKMKTRELHRESSNFDSIYICPSTFACAQLATGAACRLVEAVLSGEVLNGAAVVRPPGHHAEQDAACGFCFFNSVAVAARHAQTISGHALRILIVDWDVHHGNGTQHMFEDDPSVLYVSLHRYDHGTFFPMGDEGASSQIGRAAGTGFTVNVAWNGPRMGDADYLAAWHRLVLPIAYEFNPELVLVSAGFDAARGDPLGGCQVSPEGYAHLTHLLMGLASGRIILILEGGYNLTSISESMAACTRSLLGDPPPLLTLPRPPLSGALASITETIQVHRRYWRSLRVMKVEDREGPSSSKLVTKKAPQPAKPRLAERMTTREKKVLEAGMGKVTSASFGEESTPGQTNSETAVVALTQDQPSEAATGGATLAQTISEAAIGGAMLGQTTSEEAVGGATPDQTTSEETVGGAILDQTTSEDAVGGATLGQTTSEEAVGGATLAQTTSEAAMEGATLDQTTSEEAPGGTELIQTPLASSTDHQTPPTSPVQGTTPQISPSTLIGSLRTLELGSESQGASESQAPGEENLLGEAAGGQDMADSMLMQGSRGLTDQAIFYAVTPLPWCPHLVAVCPIPAAGLDVTQPCGDCGTIQENWVCLSCYQVYCGRYINGHMLQHHGNSGHPLVLSYIDLSAWCYYCQAYVHHQALLDVKNIAHQNKFGEDMPHPH

SEQ ID NO: 2239 - DNA, 806 bp, Rattus norvegicus
  ref <308>: DATABASE ACCESSION NUMBER: Refseq / NM_024134
  ref <309>: DATABASE ENTRY DATE: 2002-05-23
gcttgaatctaatacgtcgatcataccatgttgaagatgagcgggtggcagcgacagagccaaaataacagccggaacctgaggagagagaaaccggtccaattacagtcatggcagctgagtctctgcctttcgcctttgagacagtgtccagctgggagctggaagcctggtatgaggatctgcaggaggtcctgtcctcagatgaaattgggggcacctatatctcatccccaggaaacgaagaggaagaatcaaaaaccttcactactcttgaccctgcatccctagcttggctgactgaggagccagggccagcagaggtcacaagcacctcccaaagccctcgctctccagattccagtcagagttctatggctcaggaagaagaagaggaagatcaaggaagaactaggaaacggaaacagagtggtcagtgcgcagcccgggctgggaaacagcgactgaaggagaaggagcaggagaatgagaggaaagtggcacagcttgctgaagagaacgagcggctcaacgaggaaatcgagcgcctgaccagggaggtagagaccacacggcgggctctgatcgaccgcatggtcagtctgcaccaagcatgaactgttggcatcacctcctgtctgtctctcccggagtgtacccagcaccatcacgccagtgccaagcatgtaatctccagtgcacatgctgaggaggggactgagggtagaccaaaggagaggggcttgtacactgtacattctttattcattccatacccagtaaagtgactttgtgtgaaaaaaaaa

SEQ ID NO: 2240 - protein, 168 aa, Rattus norvegicus
  ref <308>: DATABASE ACCESSION NUMBER: Refseq / NP_077048
  ref <309>: DATABASE ENTRY DATE: 2002-05-23
MAAESLPFAFETVSSWELEAWYEDLQEVLSSDEIGGTYISSPGNEEEESKTFTTLDPASLAWLTEEPGPAEVTSTSQSPRSPDSSQSSMAQEEEEEDQGRTRKRKQSGQCAARAGKQRLKEKEQENERKVAQLAEENERLNEEIERLTREVETTRRALIDRMVSLHQA

SEQ ID NO: 2241 - DNA, 511 bp, Homo sapiens
  ref <308>: DATABASE ACCESSION NUMBER: EMBL / AW576601
  ref <309>: DATABASE ENTRY DATE: 2000-03-16
tttttttttttttttttggctgttgacacaaagtcactttactggacatggacagtaataaacaatgtaccgtctatgtgcaagccgagccctctcctggtctaccctcagtcccctcctcagcatgtgcagtgcagtgcagggtcacatgcttggcgctggcgcgatggtgctgggtacacttccggagagacagacaggaggtgatgcccactgttcatgcttggtgcaggctgaccatgcggtcgatcagagcccgccgtgtggtctccacctccctggtcaggcgctcgatttcctgcttgagccgctcgttctcttcagctagctgtgccactttccgctcgttctcctgctccttctccttcatgcgttgcttcccaggccgggctgggcactgaccactctgtttccgtttcctagttcttccttgctcttcctcctcttcctcctgggccatagaactctgactggaatctggagagcgagggctttgggatgtgcgtgtgac

SEQ ID NO: 2242 - DNA, 2977 bp, Rattus norvegicus
  ref <308>: DATABASE ACCESSION NUMBER: Refseq / NM_031731
  ref <309>: DATABASE ENTRY DATE: 2003-01-13
gaattcggcggatggaagccagctgtcccgagaagcagtgaactgtggcgtcatcccgagcagtgccttaccggtattgtgctgcttcacctgcctcgctcggcgttctcctcaggccccgccatggagcgacaggtccaacgacttcgccagacgttccggtccggccgatcgcggccgctgcgtttccgactgcagcagctcgaggccctccggaggatggtgcaagagcgagagaaggacatcttggcagccatcgcagcagacctgagcaaaagtgaactcaatgcatacagtcatgaagtcattaccatccttggggagattgacttcatgctggggaatcttcctgaattggcctctgctcggccagcgaagaagaacctgcttaccatgatggacgaggcctatgttcagccagagcctctgggagtcgtgctgattattggagcttggaactatccttttgttctgaccctgcagccactggtgggagccattgctgcaggaaatgctgccattgttaagccctcggaactcagtgaaaacacggctaagatcttggctgaactcctccctcagtatttagaccaggacctgtacatgattgttaatggcggcgttgaagaaaccacagagcttctgaggcagcggtttgatcacattctctacacaggaaacaccgcagttggaaaaattgtcatggaggctgctgccaagcacctgacccctgtgaccctggagctcgggggcaaaagcccatgctacattgacagagactgtgacctggacgttgcttgcagacggataacctggggaaagtacatgaattgtggtcagacctgtattgctcctgactatatcctgtgtgaagcctcctcccaggatcaaatcgtacagaagattaaggatacggtgaaggacttttatggggaaaatgtaaaagcttctcctgattatgaaaggatcatcaaccttcgtcactttaagaggataaaaagtttgcttgaaggacagaaaatagcttttggtggggagactgatgaagctacacgctacatagccccaaccatactcactgatgttgaccctaactccaaggtgatgcaagaagaaatttttggaccaattctcccaatagtgtctgtgaaaaatgtggaggaagccataaatttcataaatgatcgcgaaaagcccctggcactctacatattttctcacaacaataagctcatcaaacgggtgattgatgagacatccagtggtggagtcacaggcaatgatgtcatcatgcacttcactgttaattctttgccctttggaggtgtgggtgccagtggaatgggggcttatcatggcaaatacagtttcgataccttttctcatcagcgcccctgcttgttaaaagggttaaagggagagagtgttaacaaactcaggtaccctcccaacagcgagtccaaggtcagctggtcgaaattcttcctgctgaaacagttcaacaaaggaaggctgcagctgctgcttctcgtgtgcttggttgcggttgcagctgtgatcgtcaaggatcagctgtgatgacttccttgtagcctctactgaagtacccctcggccaaatggttaacacaccaatgcttttaaaattgtacccaaaccaggaaatgaaattcacaggtgaactgcagtcaaacctaagttgttgccacaaaccactgatgaaactcagtgcttcagccaaatcccagcatttgtcagccgtgcaggtgctgagagggtggagactgggaggggcgacacctagtccatggcagcgggatgtcagggagactcgacaactgctcccgcactctttgctccaggacatagctctcccacccggtgtcaacaccctccaggctttccagctgtcctctgattgctgaggttcctgttagggacccaggtactaaacctgggcgggtggatttgtcggcctcatccattgtggctcgagaccggccttcgggagtcggctctcagtctaaacatcctttctcattcatagtgtgtcacccgaagatgcttgtttgtgacattgtgacagtctgtcatgactgtcccggtgcctttgtgatgacttaaactacactgaggagcttgccaacttgtgaatgcccttcagagggtctggcagtcacagctgttccagagcccgagggacgaagattccggagcccggagtttgaggccaacctaggcaacataatgggaccctctcattattattcctccataacaatcccctcgagaccctcgatttgaatgttatataggtcttcaggataaatctgcttattttcacagcacaacacaaaaaaaatttacttttgaaatcttagagagattcctacagatcttagcatggagctgttcctgtagtgaaaggggggttattagacatgaggcttcagaactcatggggcagggttgttggagactaccgtgagctgagggggcacactgaagcgatgggatggccagaagcgcacctgagcaagcggggcagcattctctgtcagaccctaacatggctacacggggatgtggcagagagatctgtgccgttggctgccagcgctggttaggcctgaagctccaagctgcagaggtctcattgccttcccaggatccaaattaagactgcccactcaatgagaatgtcacttgcgtatgtacaaccatgtttgctgagtaacctgttccaccgttgaggctgtctgaagtgtattgtatgaggtatcaagaacgagtcattggcccatttggcaaatagttgcttatgtagcaattgtcatggactaatcataaaatattttgcacaaaatttcaatgttgaacttgcactcactgttgttaaattataaatcacagcttctagttaggccaaaatatttacatactctactaatcttcaaaataaatgtatcccggaattc

SEQ ID NO: 2243 - protein, 484 aa, Rattus norvegicus
  ref <308>: DATABASE ACCESSION NUMBER: Refseq / NP_113919
  ref <309>: DATABASE ENTRY DATE: 2003-01-13
MERQVQRLRQTFRSGRSRPLRFRLQQLEALRRMVQEREKDILAAIAADLSKSELNAYSHEVITILGEIDFMLGNLPELASARPAKKNLLTMMDEAYVQPEPLGVVLIIGAWNYPFVLTLQPLVGAIAAGNAAIVKPSELSENTAKILAELLPQYLDQDLYMIVNGGVEETTELLRQRFDHILYTGNTAVGKIVMEAAAKHLTPVTLELGGKSPCYIDRDCDLDVACRRITWGKYMNCGQTCIAPDYILCEASSQDQIVQKIKDTVKDFYGENVKASPDYERIINLRHFKRIKSLLEGQKIAFGGETDEATRYIAPTILTDVDPNSKVMQEEIFGPILPIVSVKNVEEAINFINDREKPLALYIFSHNNKLIKRVIDETSSGGVTGNDVIMHFTVNSLPFGGVGASGMGAYHGKYSFDTFSHQRPCLLKGLKGESVNKLRYPPNSESKVSWSKFFLLKQFNKGRLQLLLLVCLVAVAAVIVKDQL

SEQ ID NO: 2244 - DNA, 2169 bp, Rattus norvegicus
  ref <308>: DATABASE ACCESSION NUMBER: Refseq / NM_031741
  ref <309>: DATABASE ENTRY DATE: 2003-01-13
tgaggaggtgagccagctgcaggctacccttgcagagcaacgatggagaaagaggatcaagagaagacagggaagctgaccctggtccttgccctggcaactttcctagctgcctttggctcctccttccagtatgggtacaacgtggctgctgtcaactcgccctcagagttcatgcagcagttctacaatgacacctactacgacagaaacaaggagaacattgagtccttcaccctgacgctgctgtggtccctgactgtctccatgttcccctttggaggttttataggatctctcatggttggattcttggtgaataacttgggcagaaaaggggccttactgttcaacaacatattctccatcctgccggccatcttgatggggtgcagcaaaattgccaaatcctttgagataataattgcttccagacttctggttggaatatgtgcaggtatatcttccaacgtggtccccatgtacttaggggagctagcccccaaaaacctgcgaggggctcttggagtggttcctcagctcttcatcactgtgggcatccttgtggcccagctgtttggccttcggagtgtcttggcaagcgaggaaggctggccaatcctcctgggtctgactggagtccctgccggcctgcagctcctcttgctgcccttctttcctgagagcccccgctacctgctgattcagaagaaaaatgaatcagctgctgagaaagcccttcagacccttcgaggttggaaagatgtggacatggagatggaggaaatccggaaggaggatgaggctgagaaggcggcaggcttcatctctgtgtggaagctgttccgcatgcagtccctccgctggcaactcatctccacgatcgtcctcatgaccggccagcagctgtcaggagtgaacgcgatttactactacgctgaccagatctacctcagcgcaggggtgaaaagcaacgacgtccaatatgtgacggctgggactggggccgtcaacgtgttcatgaccatggtcacggtttttgtggtagagctttggggacgtcggaatcttctcctcatcggcttctccacctgcctcacagcttgcatagtgctgacggtcgcactggcactgcagaacaccatctcctggatgccctatgtcagcatcgtctgtgtcattgtctacgtcataggacacgccgtggggcccagtcccatccctgccctgttcatcaccgagatcttcctgcaatcctctcgaccatccgcctacatgatcggaggcagcgtccactggctctctaacttcatcgtgggcctcatcttcccgttcattcaagtgggccttggtccttacagcttcatcatctttgcgattatatgtctcctcacctccatctacatcttcatggtcgtcccagagaccaagggcaggacgtttgtcgagatcaaccagatttttgccaagaagaacaaggtatcggacgtatatccggagaaggaggaaaaggagcttaatgacctcccacctgctacccgggagcagtagcagagccaggccaccaggcagtatggccagtctgcatgggcctcctgtctagactttggttctgggttcttagtgtctgtgacactgggagggacacgagcctggcggggaatggcagccctccactcagtggggacacctgacgggctttcgtgcttccgtgctgtccctaaccatagaggccagtcacgggctcttggtcacacacaaagccatacctggcctttgctgggttgactgtggcgagggtcttgtaacattgcttttctaacaaaaacagttgccgagagacaagacgtgacggtcctattttttttttaactttttttttctattcttttttttttttttttttcggagctggggattgaacccagggccttgcgcttgctaggcaagcgctctaccactgagccaaatcccttgtgtggctcctcccatgggcgtggagagaccactggcatctgctggtgattgatgtggtcctctttttctgacccagccatgtcacaaagctgaggaacaggccacttggggagacacacggagcgtgaattatcaactgtcaacgacagtattctgtttagccaataaaacagatctgatcacttcttaaaa

SEQ ID NO: 2245 - protein, 502 aa, Rattus norvegicus
  ref <308>: DATABASE ACCESSION NUMBER: Refseq / NP_113929
  ref <309>: DATABASE ENTRY DATE: 2003-01-13
MEKEDQEKTGKLTLVLALATFLAAFGSSFQYGYNVAAVNSPSEFMQQFYNDTYYDRNKENIESFTLTLLWSLTVSMFPFGGFIGSLMVGFLVNNLGRKGALLFNNIFSILPAILMGCSKIAKSFEIIIASRLLVGICAGISSNVVPMYLGELAPKNLRGALGVVPQLFITVGILVAQLFGLRSVLASEEGWPILLGLTGVPAGLQLLLLPFFPESPRYLLIQKKNESAAEKALQTLRGWKDVDMEMEEIRKEDEAEKAAGFISVWKLFRMQSLRWQLISTIVLMTGQQLSGVNAIYYYADQIYLSAGVKSNDVQYVTAGTGAVNVFMTMVTVFVVELWGRRNLLLIGFSTCLTACIVLTVALALQNTISWMPYVSIVCVIVYVIGHAVGPSPIPALFITEIFLQSSRPSAYMIGGSVHWLSNFIVGLIFPFIQVGLGPYSFIIFAIICLLTSIYIFMVVPETKGRTFVEINQIFAKKNKVSDVYPEKEEKELNDLPPATREQ

SEQ ID NO: 2246 - DNA, 2218 bp, Homo sapiens
  ref <308>: DATABASE ACCESSION NUMBER: Refseq / NM_003039
  ref <309>: DATABASE ENTRY DATE: 2000-10-31
cttctctctccattcagtgcacgcgttactttggctaaaaggaggtgagcggcactctgcccttccagagcaagcatggagcaacaggatcagagcatgaaggaagggaggctgacgcttgtgcttgccctggcaaccctgatagctgcctttgggtcatccttccagtatgggtacaacgtggctgctgtcaactccccagcactgctcatgcaacaattttacaatgagacttactatggtaggaccggtgaattcatggaagacttccccttgacgttgctgtggtctgtaaccgtgtccatgtttccatttggagggtttatcggatccctcctggtcggccccttggtgaataaatttggcagaaaaggggccttgctgttcaacaacatattttctatcgtgcctgcgatcttaatgggatgcagcagagtcgccacatcatttgagcttatcattatttccagacttttggtgggaatatgtgcaggtgtatcttccaacgtggtccccatgtacttaggggagctggcccctaaaaacctgcggggggctctcggggtggtgccccagctcttcatcactgttggcatccttgtggcccagatctttggtcttcggaatctccttgcaaacgtagatggctggccgatcctgctggggctgaccggggtccccgcggcgctgcagctccttctgctgcccttcttccccgagagccccaggtacctgctgattcagaagaaagacgaagcggccgccaagaaagccctacagacgctgcgcggctgggactctgtggacagggaggtggccgagatccggcaggaggatgaggcagagaaggccgcgggcttcatctccgtgctgaagctgttccggatgcgctcgctgcgctggcagctgctgtccatcatcgtcctcatgggcggccagcagctgtcgggcgtcaacgctatctactactacgcggaccagatctacctgagcgccggcgtgccggaggagcacgtgcagtacgtgacggccggcaccggggccgtgaacgtggtcatgaccttctgcgccgtgttcgtggtggagctcctgggtcggaggctgctgctgctgctgggcttctccatctgcctcatagcctgctgcgtgctcactgcagctctggcactgcaggacacagtgtcctggatgccatacatcagcatcgtctgtgtcatctcctacgtcataggacatgccctcgggcccagtcccatacccgcgctgctcatcactgagatcttcctgcagtcctctcggccatctgccttcatggtggggggcagtgtgcactggctctccaacttcaccgtgggcttgatcttcccgttcatccaggagggcctcggcccgtacagcttcattgtcttcgccgtgatctgcctcctcaccaccatctacatcttcttgattgtcccggagaccaaggccaagacgttcatagagatcaaccagattttcaccaagatgaataaggtgtctgaagtgtacccggaaaaggaggaactgaaagagcttccacctgtcacttcggaacagtgactctggagaggaagccagtggagctggtctgccaggggcttcccactttggcttatttttctgacttctagctgtctgtgaatatccagaaataaaacaactctgatgtggaatgcagtcctcatctccagcctccccaccccagtgggaactgtgcaaagggctgccttgctgttcttgaagctgggctgtctctctccatgttggcctgtcaccagacccgagtcaattaaacagctggtcctccactttgctggttcagccttcgtgtggctcctggtaacgtggctccaccttgatgggtcaacctttgtgtggctcctggtaacataacaacaacagttactatagtggtgagatggaaggaatcaaattttgccagagaaactaactcggtggccccaacaggtcttccggggccatgggcatttgtttagagccaaattcatcctcttaccagatccttttccagaaatacctgtctaggaaggtgtgatgtcagaaacaatgacatccagaaagctgaggaacaggttcctgtggagacactgagtcagaattcttcatccaaattattttgttagtggaaaatggaattgcttctgtgtagtcaataaaatgaacctgatcacttttc

SEQ ID NO: 2247 - protein, 501 aa, Homo sapiens
  ref <308>: DATABASE ACCESSION NUMBER: Refseq / NP_003030
  ref <309>: DATABASE ENTRY DATE: 2000-10-31
MEQQDQSMKEGRLTLVLALATLIAAFGSSFQYGYNVAAVNSPALLMQQFYNETYYGRTGEFMEDFPLTLLWSVTVSMFPFGGFIGSLLVGPLVNKFGRKGALLFNNIFSIVPAILMGCSRVATSFELIIISRLLVGICAGVSSNVVPMYLGELAPKNLRGALGVVPQLFITVGILVAQIFGLRNLLANVDGWPILLGLTGVPAALQLLLLPFFPESPRYLLIQKKDEAAAKKALQTLRGWDSVDREVAEIRQEDEAEKAAGFISVLKLFRMRSLRWQLLSIIVLMGGQQLSGVNAIYYYADQIYLSAGVPEEHVQYVTAGTGAVNVVMTFCAVFVVELLGRRLLLLLGFSICLIACCVLTAALALQDTVSWMPYISIVCVISYVIGHALGPSPIPALLITEIFLQSSRPSAFMVGGSVHWLSNFTVGLIFPFIQEGLGPYSFIVFAVICLLTTIYIFLIVPETKAKTFIEINQIFTKMNKVSEVYPEKEELKELPPVTSEQ

SEQ ID NO: 2248 - DNA, 446 bp, Rattus norvegicus
  ref <308>: DATABASE ACCESSION NUMBER: EMBL / AA891690
  ref <309>: DATABASE ENTRY DATE: 2000-03-03
tgcttctgatcctgaccgtgcctacaacagctgctacagtgcaggggttttgtgcactgtgccaagccttatccactggactgcatccagaacagcaccaccatctagaggcagtttgaggaaagaacacggtctctgctagggaaaacgtgtccctcggccacaactcttcaagccccctgcttcaatgtacaagaagcccgattttcactatctcactattgcgtccaaattcttgttactgtctagaaaaaaaatgtattttaggtgcctcgacatccattccattcatgctccccattcccctagcaaacttccgagctgaacattgtgcttcaccgctttaatcccagtactcggaggcctatttctatgttagcggtcaacttggtctaaatagtgagttccaggccatccaggggttacagtggttgagaccctgtttc

SEQ ID NO: 2249 - DNA, 1665 bp, Rattus norvegicus
  ref <308>: DATABASE ACCESSION NUMBER: Refseq / NM_021746
  ref <309>: DATABASE ENTRY DATE: 2003-01-13
gttggcggctatacagagttcagggtggcgaccccgagagaagagcccgcaaaggaaagccccagaggcgggcaggcgggtggccggcgcggagccggccctgccacgcagtgacccggggcgcacgggcggagcccctgatcccaagtccggtcctagagcgcggtgctccggccggggatgagctccccgccacccgcccgcaagggcttttaccgccaggaggtgaccaaaacggcctgggaggtgcgcgccgtgtaccaggacctgcagcccgttggctctggtgcctatggtgcagtgtgctctgcagtagacagccgcactggcaacaaggtggccatcaagaagttgtaccggcccttccagtcggagctgtttgccaagcgcgcctacagagagttgcgcctcctcaaacacatgcgccacgagaacgtcattgggctgctggatgtgttcactcccgatgagactctggatgacttcacagacttctacctggtgatgccattcatgggcactgacctgggcaagctcatgaagcacgagactctgagtgaagacagaatccagtttcttgtgtatcagatgctgaaggggctgaagtatatccacgctgccggcgtcatccacagggacttgaaacctggaaacctggctgtgaacgaggactgtgagctgaagatcctagattttggccttgccaggcaggcggacagtgagatgacaggatatgtggtaacccggtggtatcgggcaccagaggtcatcttgaattggatgcgttacacacagacagtggacatttggtctgttggctgcatcatggcagagatgattactggaaagatcctgttcaaaggcaatgaccacctggaccagctgaaggagatcatgaaagtcacagggacaccccctcctgagtttgtacagaagctacagagtgctgaggccaagaactacatggaaggcctccctgagttggaaaagaaggattttgcttctgtcctgaccaatgcaagccctcaggccgtgaatctcctggaaaagatgctggtgttggatgcggaacagcgggtgacagcagctgaggcattagcccacccatactttgagtcccttcgggacactgaggatgagcccaaggcccagaaatatgatgactcctttgatgacgtagaccgcacccttgaggaatggaagcgtgttacgtataaggaagtgctcagcttcaagcctcccaggcagctaggagccagagttccaaaggagacagctctgtgaagacctccgggtggtttggggggtatcctaaggaggctgtctgggagcttcgcagacaccttggcttcccttctccggaagaggaatcctggttggcaccagtgcctggtgcttttatcccaagtcatccacctggaaaggctgtgtagaccccttgaatcacgaaccctccatctccaagccagttcttcagattttgagcgcccgagatgaccctggcagaacatctaagctttttttttttcttttttctttttttcggagctggggaccgaacccagggccttgcgcttgctaggcaagcgctctactactgagctaaatccccaaccccacatctaagctttctgtccaagacccctacccaacatgggactagcc

SEQ ID NO: 2250 - protein, 367 aa, Rattus norvegicus
  ref <308>: DATABASE ACCESSION NUMBER: Refseq / NP_068514
  ref <309>: DATABASE ENTRY DATE: 2003-01-13
MSSPPPARKGFYRQEVTKTAWEVRAVYQDLQPVGSGAYGAVCSAVDSRTGNKVAIKKLYRPFQSELFAKRAYRELRLLKHMRHENVIGLLDVFTPDETLDDFTDFYLVMPFMGTDLGKLMKHETLSEDRIQFLVYQMLKGLKYIHAAGVIHRDLKPGNLAVNEDCELKILDFGLARQADSEMTGYVVTRWYRAPEVILNWMRYTQTVDIWSVGCIMAEMITGKILFKGNDHLDQLKEIMKVTGTPPPEFVQKLQSAEAKNYMEGLPELEKKDFASVLTNASPQAVNLLEKMLVLDAEQRVTAAEALAHPYFESLRDTEDEPKAQKYDDSFDDVDRTLEEWKRVTYKEVLSFKPPRQLGARVPKETAL

SEQ ID NO: 2251 - DNA, 1457 bp, Homo sapiens
  ref <308>: DATABASE ACCESSION NUMBER: Refseq / NM_002969
  ref <309>: DATABASE ENTRY DATE: 2002-11-05
ggccgcttcgggtttccggaggggccggagggcgggcgagggcgtcacgtgcgcgccgcccgcgggccggttggtccccgggcgggggaggggccgtgcgcagcctgggtcggggtcgggccggggtcggcacctgggacatccctgagggaagggccgggagcgggagcgccccagcggccggcgggcgggcgggcgagcggacgagcggcgcggagccggcccgaggcgcgcgccgagggagccccgtccccggtcgtgggggcaccgcccgcaggctctgcggggtgggcagctcccgggcctgccatgagctctccgccgcccgcccgcagtggcttttaccgccaggaggtgaccaagacggcctgggaggtgcgcgccgtgtaccgggacctgcagcccgtgggctcgggcgcctacggcgcggtgtgctcggccgtggacggccgcaccggcgctaaggtggccatcaagaagctgtatcggcccttccagtccgagctgttcgccaagcgcgcctaccgcgagctgcgcctgctcaagcacatgcgccacgagaacgtgatcgggctgctggacgtattcactcctgatgagaccctggatgacttcacggacttttacctggtgatgccgttcatgggcaccgacctgggcaagctcatgaaacatgagaagctaggcgaggaccggatccagttcctcgtgtaccagatgctgaaggggctgaggtatatccacgctgccggcatcatccacagagacctgaagcccggcaacctggctgtgaacgaagactgtgagctgaagatcctggacttcggcctggccaggcaggcagacagtgagatgactgggtacgtggtgacccggtggtaccgggctcccgaggtcatcttgaattggatgcgctacacgcagacggtggacatctggtccgtgggctgcatcatggcggagatgatcacaggcaagacgctgttcaagggcagcgaccacctggaccagctgaaggagatcatgaaggtgacggggacgcctccggctgagtttgtgcagcggctgcagagcgatgaggccaagaacaacatgaagggcctccccgaattggagaagaaggattttgcctctatcctgaccaatgcaagccctctggctgtgaacctcctggagaagatgctggtgctggacgcggagcagcgggtgacggcaggcgaggcgctggcccatccctacttcgagtccctgcacgacacggaagatgagccccaggtccagaagtatgatgactcctttgacgacgttgaccgcacactggatgaatggaagcgtgttacttacaaagaggtgctcagcttcaagcctccccggcagctgggggccagggtctccaaggagacgcctctgtgaagatctctgggctccggggtggcagtgaggaccaccttcacctt

SEQ ID NO: 2252 - protein, 367 aa, Homo sapiens
  ref <308>: DATABASE ACCESSION NUMBER: Refseq / NP_002960
  ref <309>: DATABASE ENTRY DATE: 2002-11-05
MSSPPPARSGFYRQEVTKTAWEVRAVYRDLQPVGSGAYGAVCSAVDGRTGAKVAIKKLYRPFQSELFAKRAYRELRLLKHMRHENVIGLLDVFTPDETLDDFTDFYLVMPFMGTDLGKLMKHEKLGEDRIQFLVYQMLKGLRYIHAAGIIHRDLKPGNLAVNEDCELKILDFGLARQADSEMTGYVVTRWYRAPEVILNWMRYTQTVDIWSVGCIMAEMITGKTLFKGSDHLDQLKEIMKVTGTPPAEFVQRLQSDEAKNNMKGLPELEKKDFASILTNASPLAVNLLEKMLVLDAEQRVTAGEALAHPYFESLHDTEDEPQVQKYDDSFDDVDRTLDEWKRVTYKEVLSFKPPRQLGARVSKETPL

SEQ ID NO: 2253 - DNA, 1458 bp, Rattus norvegicus; identical to SEQ ID NO: 584
  ref <308>: DATABASE ACCESSION NUMBER: EMBL / E03229
  ref <309>: DATABASE ENTRY DATE: 2000-09-02

SEQ ID NO: 2254 - DNA, 5775 bp, Rattus norvegicus
  ref <308>: DATABASE ACCESSION NUMBER: Refseq / NM_031013
  ref <309>: DATABASE ENTRY DATE: 2003-01-13
gcccgggtcccgcctcttcctcagcttggagctgggctccgaaggctgctctgggacagagtctcatactgatgaacggagagcactcaatggccacgcctggagagtcctgcgcaggcctgagggtctggaaccagacagaacaggagcctgtggcctatcacttgctcaacctgtgcttcctgcgagccgccgggagctgggtgccccccatgtacctctgggtccttggccccatctacctcctctacatccatcgccatggctgctgctacctccggatgtcccgcctcttcaaaatcaaaatggtgctcggctttgccctcatccttctctacaccttcaacgcggccgtgcctctctggaggatccaccggggcatgccccaggccccagagcttctcattcaccctaccgtgtggctcaccaccatgagcttcgccaccttcctgatccacatggagagaaagaagggggtccgtgcatctgggttgttgttcgggtactggctgctctgctgcctcgtgccagccatcgacactgtccagcaggcctccgcagggagcttccgccaggagcccctccaccacctggccacctacctgtgcttgtccctggtggtggcagagctggtgctgtcttgtctggtagaccagccacccttcttctcggaagactccaagccattgaatccatgtccagaggccgaggcctcttttccctccaaggccatgttctggtgggcctctggactgctatggaagggctacaggaaactgctggggccaaaagacctctggtcacttgagagagaaaactcttcagaagaacttgtttcccagctggaaagagaatggaggaggaacttcagtgagctgccggggcacaaagggcacagtggtatggggacccccgagacagaggccttcctgcagccagagaggagccagcggggcccgctgctcagggctatctggcgtgtgttccggtccactttcctgctggggaccctcagcctggtcattagcgatgccttcaggtttgctgttcccaagctcctcagtctgtttctggagttcatgggcgacctcgagtcctcggcttggacgggctggctcctggctgtgctgatgttcttgtcggcctgcctacagacactgtttgaacagcagtacatgtacagagtcaaggtcctgcagatgaggctgcgaacagccatcactggcctggtgtacagaaaggtcctggtcctgtccagtggttccagaaagtccagtgcagcaggggacgtggtcaacctggtgtcagtggacgtacagcggctggtcgagagcatcctccacctcaacgggctgtggctgctcttcctgtggatcattgtgtgctttgtctacctgtggcagctccttgggccctctgccctcacagccgttgctgtcttcctgagccttctccccctgaacttcttcattaccaagaagaggagcttccatcaggaagaacagatgaggcagaaggcctcccgagcacggctcaccagctccatgctcagaactgtgagaaccatcaagtcccacggctgggagtgtgccttcctggagcgactcctgcatatccggggccaggagctaggtgccctgaagacctccgccttcctcttctctgtgtctctcgtgtccttccaagtgtctacatttctggtggcgctggttgtgtttgctgtccacaccctggtggcagaggacaacgccatggatgcggagaaggcgtttgtgacgctcacggtgctcagcatccttaacaaagcccaggccttcctccccttctctgtgcactgcctcgttcaggctcgggtgtcctttgaccgcctagctgctttcctgtgcctggaagaagtagaccccaatggcatggtcttgagtccctccagatgctcctcgaaggatcgaatttctatacacaatggcaccttcgcttggtcccaggagagcccgccctgcctgcacgggatcaacctcaccgtgccccagggctgtctgctggctgttgtgggtccagtgggggctggaaagtcctccctgctgtctgccctgcttggggagctgttgaaggtagaagggtctgtgagcattgagggttccgtggcctacgtgcctcaggaggcttgggtccagaatacctctgtggtggagaatgtgtgcttcaggcaggagctggatctgccatggttgcaggaagttctagaagcctgtgccttggggtctgatgtggccagcttccctgcaggagttcacaccccagtaggggagcagggcatgaatctttctgggggccagaagcagcggctgagcttggctcgggctgtgtacagaagggctgctgtgtacctgatggatgaccccctagcagccctggatgcgcatgtcagccaggaagtcttcaaacaggtcattggccccagtggacttctccaaggtacgactcggatccttgtaacacacacgctgcatgtcctgccccaagctgaccagatcctggtgctggccaatgggaccatcgcagagatgggctcctaccaagaccttctgcataggaacggagccctggtgggtcttctggatggagccagacagcctgcaggcgaaggagaaggagaagcacatgctgcagccaccagtgatgaccttggaggcttttctggaggtgggacgcccacgcgcagaccagagaggcccagacccagtgacgcagcccctgtgaagggcagtacttcagaggcacagatggagccttctctggatgacgttgaggtcactggactgacagcaggagaggacagtgtgcagtatggccgggtgaagagcgccacatacctgagctacctgcgggcggtgggcacaccgctctgcacctacaccctgttcctcttcctctgccagcaagtggcgtccttctgccaaggctactggctgagcctctgggccgacgacccggtcgtggatgggaagcagatgcattcagccctgcgtggctccatctttggactccttggctgtctgcaagccatcggactgtttgcctccatggctgcggtgttcctgggtggagcccgagcttcatgcctgcttttccggagcctcctctgggacgtggctcgctctcccattggcttctttgagcgcacaccagtcgggaacctgctgaaccgtttttccaaggagacggacatagtggatgtggacatcccagacaagatgaggaccctgctgacctatgcctttggactcctggaggttggcctggcagtgtcgatggccacaccactggctattgtggccatcctacctcttatgctcctttatgctgggtttcagagcctctacgtggccacatgttgccagctgagacgcctggagtcggccagttactcctcagtgtgttcccatctggctgagaccttccagggcagtcaggtggtcagggccttccaggcccaggggcccttcacagctcagcacgatgccctcatggatgagaaccagaggatcagtttcccgaggctggtggctgacaggtggctggctgccaacctggagctcctggggaatggcctggtgtttgtggccgctacatgtgctgtgctgagcaaggctcacctgagtgctggcctcgcgggcttctcggtttctgctgccctccaggtaacacagactctgcagtgggtggtccgcagctggacagatctggagaacagcatggtggccgtggagcgagtacaggactacgttcacacccccaaggaggctccctggaggctgccctcctctgcagcccagcctctctggccctgtgggggacagattgagttccgagactttgggctcagacaccgaccagagctgcccatggctgtgcagggtgtgtccctgaagatccatgcaggggagaaggtgggcatcgtgggcaggacaggggccgggaagtcctccctgacttggggcctgctgcggcttcaggaggccactgagggtggtatttggatcgatggggtccccatcaccgacatggggctgcacacactgcggtccagaatcaccatcatccctcaggaccctgtcctgttcccgggctcgctgcggatgaacctggacctgcttcaggagaacacagatgagggcatctgggcagcgctggagacggtgcagctcaaggccttcgtgaccagcctgcctggccagctgcagtatgagtgctcaggccagggagatgacctgagtgtgggtcagaagcagctcctgtgtctggcacgtgcccttctccggaaaacccagatcctcatcctggatgaagccactgcctccgtggacccagggacggagatacagatgcaggcggccctcgagcgctggtttgcacagtgtacagtgctgctcattgctcaccgcctgcgctccgtgatgaactgcgccagggttctagtcatggatgaggggcaggtggcagagagtggcagtccagcacagctgctggcccagaaaggcctgttttacaggctagcccaggagtcgggcctagcctgagtcaggactcttcccaaacctcctggagccagccacagagcctgcagtagctggagatgccagagactcaggggccacatgatgcccaatctaaactcctttttgggaggaagatagcagagagagtgacagagtattggaataccagacccagaagaacccagcatgcccaggttggcttgagcaaggccacacccaccccaggccaaaaagaacagtgactctcagcccaagctgtctacttcaaggccatacccaccccaggccattcaggttggatgccctggaccggggtgatggcgtgcacatatcccctaactccttattttgaggtcattgtagagttcactcacagttttaagaagccacatggagagaagccgcaaaccctctgccctgtttattccgggggtgacaccttgtccaaccctaggacaagatgaagcatcacactgactccgactgacttgtctttacctctgctgcgtgtgcatcagtgtttggactccgtgctttgtgctctcattggtttttgagacaggatttcacatagcccaggctggccctgaactcactttgttgctgaggatggccttgaacatctgatgctcctgccttccctcccaagtgctgggattatggcctgtgtcaccacgccctgtgtgggggtctcaaacaaggctttgtgtgtgcttgacaggcactcactctaaaaactgtgttacagccccggctctggattcggttctactcctgtttaaaattgtagtggtgaagggtctcttgctcaaactggcctcaaactcgagatgctcctgtctcggtctccagagtgctggaatgacagacgtgtgccactacacctgccttgactcaccacagctaagtagtgacatccccatgggccagggctggtgagtcccgtgcgtgacagtgtgctgagcagtacccttcgcttctgctcagagatgcccttctaaagctgtggcaaagagatttccacacactgccgtgcccccccaggactgcatcatgaattgatccgccctaatagcacccatgactccctgagcagtgatatgttgggttcaggagaggattcctgcttgcttcttggacagggcttgctcttccctcgaccctgaggcttctctgattggctacccttaataaaggatttacgggatttcctttc

SEQ ID NO: 2255 - protein, 1502 aa, Rattus norvegicus
  ref <308>: DATABASE ACCESSION NUMBER: Refseq / NP_112275
  ref <309>: DATABASE ENTRY DATE: 2003-01-13
MNGEHSMATPGESCAGLRVWNQTEQEPVAYHLLNLCFLRAAGSWVPPMYLWVLGPIYLLYIHRHGCCYLRMSRLFKIKMVLGFALILLYTFNAAVPLWRIHRGMPQAPELLIHPTVWLTTMSFATFLIHMERKKGVRASGLLFGYWLLCCLVPAIDTVQQASAGSFRQEPLHHLATYLCLSLVVAELVLSCLVDQPPFFSEDSKPLNPCPEAEASFPSKAMFWWASGLLWKGYRKLLGPKDLWSLERENSSEELVSQLEREWRRNFSELPGHKGHSGMGTPETEAFLQPERSQRGPLLRAIWRVFRSTFLLGTLSLVISDAFRFAVPKLLSLFLEFMGDLESSAWTGWLLAVLMFLSACLQTLFEQQYMYRVKVLQMRLRTAITGLVYRKVLVLSSGSRKSSAAGDVVNLVSVDVQRLVESILHLNGLWLLFLWIIVCFVYLWQLLGPSALTAVAVFLSLLPLNFFITKKRSFHQEEQMRQKASRARLTSSMLRTVRTIKSHGWECAFLERLLHIRGQELGALKTSAFLFSVSLVSFQVSTFLVALVVFAVHTLVAEDNAMDAEKAFVTLTVLSILNKAQAFLPFSVHCLVQARVSFDRLAAFLCLEEVDPNGMVLSPSRCSSKDRISIHNGTFAWSQESPPCLHGINLTVPQGCLLAVVGPVGAGKSSLLSALLGELLKVEGSVSIEGSVAYVPQEAWVQNTSVVENVCFRQELDLPWLQEVLEACALGSDVASFPAGVHTPVGEQGMNLSGGQKQRLSLARAVYRRAAVYLMDDPLAALDAHVSQEVFKQVIGPSGLLQGTTRILVTHTLHVLPQADQILVLANGTIAEMGSYQDLLHRNGALVGLLDGARQPAGEGEGEAHAAATSDDLGGFSGGGTPTRRPERPRPSDAAPVKGSTSEAQMEPSLDDVEVTGLTAGEDSVQYGRVKSATYLSYLRAVGTPLCTYTLFLFLCQQVASFCQGYWLSLWADDPVVDGKQMHSALRGSIFGLLGCLQAIGLFASMAAVFLGGARASCLLFRSLLWDVARSPIGFFERTPVGNLLNRFSKETDIVDVDIPDKMRTLLTYAFGLLEVGLAVSMATPLAIVAILPLMLLYAGFQSLYVATCCQLRRLESASYSSVCSHLAETFQGSQVVRAFQAQGPFTAQHDALMDENQRISFPRLVADRWLAANLELLGNGLVFVAATCAVLSKAHLSAGLAGFSVSAALQVTQTLQWVVRSWTDLENSMVAVERVQDYVHTPKEAPWRLPSSAAQPLWPCGGQIEFRDFGLRHRPELPMAVQGVSLKIHAGEKVGIVGRTGAGKSSLTWGLLRLQEATEGGIWIDGVPITDMGLHTLRSRITIIPQDPVLFPGSLRMNLDLLQENTDEGIWAALETVQLKAFVTSLPGQLQYECSGQGDDLSVGQKQLLCLARALLRKTQILILDEATASVDPGTEIQMQAALERWFAQCTVLLIAHRLRSVMNCARVLVMDEGQVAESGSPAQLLAQKGLFYRLAQESGLA

SEQ ID NO: 2256 - DNA, 395 bp, Homo sapiens
  ref <308>: DATABASE ACCESSION NUMBER: EMBL / AV660378
  ref <309>: DATABASE ENTRY DATE: 2002-01-10
gtttattggtgatcccaagcctccagcctggaagggctacctcctcgccgtgctgatgttcctctcggcctgcctgcaaacgctgtttgagcagcagaacatgtacaggctcaaggtgctgtagatgaggctgcggtcggccatcactggcctggtgtacagaaaggcatccacagcatatctgaagaaatattcagaagttaactaatctcagatgatttcagcaggagtaaagaagagaaacagactcagaaatgccattacaacagttaattatgtcaaatttatcaccctgattgatcacgcagcattaacctcaagaacgccaagccaagtttttttgacaaatgtgagccaaggtttccgaaaaactagcagatatgactgtgacttac

SEQ ID NO: 2257 - DNA, 2451 bp, Rattus norvegicus
  ref <308>: DATABASE ACCESSION NUMBER: Refseq / NM_022404
  ref <309>: DATABASE ENTRY DATE: 2003-01-13
attctagcttggttggtagggtagaggattgtgtatgtcggttgggggtgaagggcaacgacagtgtaattctttcttggagctaagcctggaaaatagacagcagcaccgtgtttgtagttcccatgagttcaaggctgaggtcgcggctgacagccactccgcgcacgatcacttctggagttcttcatctcagaactctcttatccttgtcaactcccccactccctggacccatggtctcgcccggagttactatcgataactctacgctcggcccggcttctatcgactcgctcctgctcgcctcgccgtcctggactaaggcagagtgcagagcgtgtgttaagccatcaaacaatgaataccaccccaggcacagtgggcagtgaccctgtcatcttagcaactgcaggctatgaccacacagtgcgcttttggcaggctcacagtggaatctgcactcgaacagtgcagcatcaggactctcaggtgaatgcattggagatcactccagaccggagcatgattgctgctacaggttaccaacatatccgcatgtatgatctcaactccaataaccccaaccccatcatcagttatgacggagtcagtaagaacatcgcatcagtgggttttcatgaggatggccgctggatgtatacaggtggagaggactgcacggctcgcatctgggacctcaggtcccggaacctgcagtgtcagcgtatcttccaggtgaatgcacccattaattgcgtgtgtctacatcccaaccaggcagaactcatcgtgggtgaccagagcggcacgagccacatctgggacctgaagacagaccacaatgagcagctgatccctgagcctgagttttccatcacatctgcccacattgaccccgatgccagctacatggcggcagtcaatagtgccggaaactgctttgtctggaacctgacggggggcattggtgacgaggtgactcagctcatccccaagaccaagatcccagcccacacgcgctacgccctgcagtgccgcttcagccctgactccacgttacttgcgacctgttcggctgaccagacgtgtaaaatctggaggacatccaacttctccctgatgacagaactcagcatcaagagtagtaaccccggagagtcatcccgtggctggatgtggggctgcgccttctcaggggattcccagtatatcgtcacagcttcttcagacaacctggcccggctctggtgtgtagagactggagagatcaagagagagtatggtggccatcagaaagctgtcgtctgcttggccttcaacgacagcgtgctgggctagcccctgccccttgagggctgcactgggcaaccaggactgcctggtctagtggctctaagaggatgtacctgaacaataccctgctccaagagagactcaggtcagcctctgcatatcaggccagtgggacctgacccgactaccctcggcccctcttggccaacctagactttttggctactctaccctgggactttctccgtgcccagatctgttgtcagaaagctcacaaagccaggctgcatgtgcctggattgggagtcttctccctttagagagaccagacctagagtgcttggaactgttgaggacatcggaggttgatgcctgtatcccagagctgacaggtactggccttcctgccctctttccactctgcataccctggaagaggtgcttaccttggaagggctgtatgtgaaaccaagaagccctccagccacggcccctgcagtgagcagtgtcagcatcagcagcaagcctgctgctctccagcccctgtagcagggtttggtcttcacctgagggcacagtactagctgtggggcttcgggcttagagactcgggagccgacttgctcagggaaagggctgaggatggtaggtggtgactcctgtctcctcctatggcatccctgagttcttgtcttgggggtggtagagacttacctcaacaggcttggacctgaggctctcagtgaggatgtgcccctgcttcatgctgcagcccctgctgacaatgcactgattgtctgcagccccttggaggagtcagccagggaaacctcaggatgcctttgatgaatcgaactgtatcctcccctcccaaccccaccgcttccttcccagccagtatctgatagcctgcctcagagccaggacaaccctctcccccacttgtgattgctggttaccaggtttgtccctggactcttggcctgtgcagaacatgggattttggagtgtgtgtgagctggccttgatgttagaattggctaggtcttggccagggtgacttttgtctggttgggcagatttttttcttggtgtgttacctctgactcctgagctagacacaggaaccatcaataaaggggtatgaaccatcag

SEQ ID NO: 2258 - protein, 326 aa, Rattus norvegicus
  ref <308>: DATABASE ACCESSION NUMBER: Refseq / NP_071799
  ref <309>: DATABASE ENTRY DATE: 2003-01-13
MNTTPGTVGSDPVILATAGYDHTVRFWQAHSGICTRTVQHQDSQVNALEITPDRSMIAATGYQHIRMYDLNSNNPNPIISYDGVSKNIASVGFHEDGRWMYTGGEDCTARIWDLRSRNLQCQRIFQVNAPINCVCLHPNQAELIVGDQSGTSHIWDLKTDHNEQLIPEPEFSITSAHIDPDASYMAAVNSAGNCFVWNLTGGIGDEVTQLIPKTKIPAHTRYALQCRFSPDSTLLATCSADQTCKIWRTSNFSLMTELSIKSSNPGESSRGWMWGCAFSGDSQYIVTASSDNLARLWCVETGEIKREYGGHQKAVVCLAFNDSVLG

SEQ ID NO: 2259 - DNA, 2927 bp, Rattus norvegicus
  ref <308>: DATABASE ACCESSION NUMBER: Refseq / NM_031784
  ref <309>: DATABASE ENTRY DATE: 2003-01-13
cgggccggtccctgggcctgagctccggctccggctggggcgcctgcgatgtctcaagatggcggagctgggcgaattaaagcacatggtgatgagtttccgggtgtctgagctccaggtgctccttggcttcgctggcaggaacaagagtgggcggaagcacgaattgctggccaaggccctgcacctcctcaagtctagctgcgcccccagcgtccagatgaagatcaaagaactttaccgcaggcgctttccccggaagaccctggggccttccgatctctctttgctctctttgccccctggcacctctcctgtaggctcccccagcccccttgcttccattcctcccaccctcctgacccctggcaccttgctgggccctaagcgtgaggtggacatgcaccctcctctgccccagcctgtgcaccctgacgtcaccatgaaaccactgcccttctacgaagtctacggagagctcatccggccgaccacccttgcgtccacctccagtcagaggtttgaggaagcccactttacctttgcactcactccccagcagctgcagcagattctcacatccagggaggttctgccaggagccaagtgcgattataccatacaagtgcagctcaggttctgtctctgtgagaccagctgcccccaggaggactatttcccccctaacctctttgtcaaggttaatgggaaactctgccccctgccgggttacctccctccaaccaagaatggagctgagcccaagaggcctagtcgtccaatcaacatcacacccctggctcgtctctcagccactgttcccaacaccatagtggttaactggtcatctgagtttggacggaattactccttgtctgtgtacctggtgaggcagttgactgcagggaccctgctacaaaagctcagagccaagggtatccggaatccagaccattcccgagcactgatcaaggagaaattgactgctgaccccgacagtgaagtggctactacaagtctccgggtgtcactcatgtgcccgctggggaagatgcgcctgactgtcccatgccgcgctctcacctgtgcccacctgcagagtttcgatgctgccctttatctacagatgaatgagaaaaagccaacatggacgtgccctgtgtgtgacaagaaggctccctatgagtcactgattattgatggtttattcatggaaattcttaattcctgttcggattgtgatgagatccagttcatggaagatggatcctggtgtccaatgaaacccaagaaggaggcatccgaggtttgccccccaccagggtatgggctggatggtctccagtatagcccagtccaggagggaaatcagtcagagaataagaagagggttgaagtcattgacttgacaatcgaaagctcatcagatgaggaagatctgccccccaccaagaagcactgccctgttacctcggctgccattccagcccttcctggaagcaaaggagccctgacctctggtcaccagccgtcttcggtgctgcggagccctgcaatgggtacactgggcagtgatttcctgtctagtctcccactacatgagtacccacctgccttcccgctgggggctgacatccaaggtttagatttattttctttccttcagactgagagtcagcactacagcccttcagttatcacttcactagatgagcaggacacccttggccacttcttccaattccggggaacccctccccacttcctgggcccactggcccccacattggggagctctcaccgcagcgccactccagcacccgctcctggccgtgtcagcagcattgtggctcctgggagttccttgagggaagggcatggaggacccctgccttccggtccctctttgactggctgtcggtcagacgtcatttccttggactgagttatttggattgcaaaatcaatttctactggccctagcactgagcagatacattgtgggttcccaacccctggctgctctgatccctcaggggtcattggtcaaaggccaggccagatcttcatggacacctgcttttggccttatcactgcctaacaaggccagtactcaaagggttaacatttaaccttttgaaaaaggacattggggtctgtttttggaagtgttctttgatgtagcacattcctttgggtagggtaacctaggcagtgggaggcagatggaagggtaggggttcctcacccttcaccagatcttcagcctcttggggaaagggcagtttcctgcccctcccccaggactcctttccgtacccaaacccaaacatctgttctttttcgtccattcccttctctttggccatactgtcaggtggcaggtcagagatggacagacaactctattttgggttgcagatttcttttttgtacataaataagaaaactccaaattatccaaagatgacttcccttgccttttacttcccagtgtgactcgaggaggaaacaaggccttagttgtgatccccaggggctcgggaacagggcgtggcctgcctactgcctgggtctctctatttatatatttaagttcacaatgtttttatgctaaacagtcaagggcctaagcttctagtgacctgtgctcaggcctagattgttcttgcaccttttatgggacatgggggctctgttctccttcccaatactcagcgccccttcagggccaaagccctgtgatgtgatttcactttttatccccagagctgtagcagagttctcgcctacaataaaggttgtgaatgttctgtgagcgtcatggaggggagagatgttgtaccttgttttccagacccatggtttgtggggcagagggtccatgttctatcctttcacttagaaaaaaaaaaaaaaaaaaaaa

SEQ ID NO: 2260 - protein, 628 aa, Rattus norvegicus
  ref <308>: DATABASE ACCESSION NUMBER: Refseq / NP_113972
  ref <309>: DATABASE ENTRY DATE: 2003-01-13
MAELGELKHMVMSFRVSELQVLLGFAGRNKSGRKHELLAKALHLLKSSCAPSVQMKIKELYRRRFPRKTLGPSDLSLLSLPPGTSPVGSPSPLASIPPTLLTPGTLLGPKREVDMHPPLPQPVHPDVTMKPLPFYEVYGELIRPTTLASTSSQRFEEAHFTFALTPQQLQQILTSREVLPGAKCDYTIQVQLRFCLCETSCPQEDYFPPNLFVKVNGKLCPLPGYLPPTKNGAEPKRPSRPINITPLARLSATVPNTIVVNWSSEFGRNYSLSVYLVRQLTAGTLLQKLRAKGIRNPDHSRALIKEKLTADPDSEVATTSLRVSLMCPLGKMRLTVPCRALTCAHLQSFDAALYLQMNEKKPTWTCPVCDKKAPYESLIIDGLFMEILNSCSDCDEIQFMEDGSWCPMKPKKEASEVCPPPGYGLDGLQYSPVQEGNQSENKKRVEVIDLTIESSSDEEDLPPTKKHCPVTSAAIPALPGSKGALTSGHQPSSVLRSPAMGTLGSDFLSSLPLHEYPPAFPLGADIQGLDLFSFLQTESQHYSPSVITSLDEQDTLGHFFQFRGTPPHFLGPLAPTLGSSHRSATPAPAPGRVSSIVAPGSSLREGHGGPLPSGPSLTGCRSDVISLD

SEQ ID NO: 2261 - DNA, 2808 bp, Homo sapiens
  ref <308>: DATABASE ACCESSION NUMBER: Refseq / NM_006099
  ref <309>: DATABASE ENTRY DATE: 2001-06-14
ggcggagctgggcgaattaaagcacatggtgatgagtttccgggtgtctgagctccaggtgcttcttggctttgctggccggaacaagagtggacggaagcacgagctcctggccaaggctctgcacctcctgaagtccagctgtgcccctagtgtccagatgaagatcaaagagctttaccgacgacgctttccccggaagaccctggggccctctgatctctcccttctctctttgccccctggcacctctcctgtaggctcccctggtcctctagctcccattcccccaacgctgttggcccctggcaccctgctgggccccaagcgtgaggtggacatgcacccccctctgccccagcctgtgcaccctgatgtcaccatgaaaccattgcccttctatgaagtctatggggagctcatccggcccaccacccttgcatccacttctagccagcggtttgaggaagcgcactttacctttgccctcacaccccagcaagtgcagcagattcttacatccagagaggttctgccaggagccaaatgtgattataccatacaggtgcagctaaggttctgtctctgtgagaccagctgcccccaggaagattattttccccccaacctctttgtcaaggtcaatgggaaactgtgccccctgccgggttaccttcccccaaccaagaatggggccgagcccaagaggcccagccgccccatcaacatcacacccctggctcgactctcagccactgttcccaacaccattgtggtcaattggtcatctgagttcggacggaattactccttgtctgtgtacctggtgaggcagttgactgcaggaacccttctacaaaaactcagagcaaagggtatccggaacccagaccactcgcgggcactgatcaaggagaaattgactgctgaccctgacagtgaggtggccactacaagtctccgggtgtcactcatgtgcccgctagggaagatgcgcctgactgtcccttgtcgtgccctcacctgcgcccacctgcagagcttcgatgctgccctttatctacagatgaatgagaagaagcctacatggacatgtcctgtgtgtgacaagaaggctccctatgaatctcttatcattgatggtttatttatggagattcttagttcctgttcagattgtgatgagatccaattcatggaagatggatcctggtgcccaatgaaacccaagaaggaggcatctgaggtttgccccccgccagggtatgggctggatggcctccagtacagcccagtccaggggggagatccatcagagaataagaagaaggtcgaagttattgacttgacaatagaaagctcatcagatgaggaggatctgccccctaccaagaagcactgttctgtcacctcagctgccatcccggccctacctggaagcaaaggagtcctgacatctggccaccagccatcctcggtgctaaggagccctgctatgggcacgttgggtggggatttcctgtccagtctcccactacatgagtacccacctgccttcccactgggagccgacatccaaggtttagatttattttcatttcttcagacagagagtcagcactatggcccctctgtcatcacctcactagatgaacaggatgcccttggccacttcttccagtaccgagggaccccttctcactttctgggcccactggcccccacgctggggagctcccactgcagcgccactccggcgccccctcctggccgtgtcagcagcattgtggcccctgggggggccttgagggaggggcatggaggacccctgccctcaggtccctctttgactggctgtcggtcagacatcatttccctggactgagttccctggattatggaaacttcgctgtcccccaacactgagcaagtatgctgtggagtcccaaccccagctactctgatccctctgggggctctggccaagggccagacagaccttcacagatgcctacttttggcctcatctctgcctgacaaggccagcacccaaagggttaatatttaacctctttttaaggacactggggtctgtttctggaaatgttctttagatggtggcacattcctttgggtatgttaacctaggcagtgggaggcaaatgggatggtatgtgagctaggagaagggctgaaccctcagccttgactatgtctagagcctcttggggaaggggcacctctcttgaaccccaaatgctctctcttcttattacccaaacccatggctctatttcttcttcacatccattgtctcttcatgtctattccattcccttcggccaaacagacaggtggaaaaactgagacaggcagtttcagagatggacagagaactttattttggattgtggatgtggacttttttgtacataaataagaaaaaccaaaatactccaaagatgacttcccctgcctcctactccagtatgacagaggaggatgtaaggccttagccatgatctgcaggggtctgggagtcaggcccggcctattgcttgggtctctctctatttatatatctaagttcacagtgtttcttattccccctaagcttctagaggctcatggccctgtagttaggcctggctcattctgcacctttccagggaggtggaaggaccctgtgccctccttcccaatcttctttttcaggctcgccaaggcctaggacctatgttgtaattttactttttatttctaaagttgtagtgaagctctcacccataataaaggttgtgaatgttc

SEQ ID NO: 2262 - protein, 619 aa, Homo sapiens
  ref <308>: DATABASE ACCESSION NUMBER: Refseq / NP_006090
  ref <309>: DATABASE ENTRY DATE: 2001-06-14
MVMSFRVSELQVLLGFAGRNKSGRKHELLAKALHLLKSSCAPSVQMKIKELYRRRFPRKTLGPSDLSLLSLPPGTSPVGSPGPLAPIPPTLLAPGTLLGPKREVDMHPPLPQPVHPDVTMKPLPFYEVYGELIRPTTLASTSSQRFEEAHFTFALTPQQVQQILTSREVLPGAKCDYTIQVQLRFCLCETSCPQEDYFPPNLFVKVNGKLCPLPGYLPPTKNGAEPKRPSRPINITPLARLSATVPNTIVVNWSSEFGRNYSLSVYLVRQLTAGTLLQKLRAKGIRNPDHSRALIKEKLTADPDSEVATTSLRVSLMCPLGKMRLTVPCRALTCAHLQSFDAALYLQMNEKKPTWTCPVCDKKAPYESLIIDGLFMEILSSCSDCDEIQFMEDGSWCPMKPKKEASEVCPPPGYGLDGLQYSPVQGGDPSENKKKVEVIDLTIESSSDEEDLPPTKKHCSVTSAAIPALPGSKGVLTSGHQPSSVLRSPAMGTLGGDFLSSLPLHEYPPAFPLGADIQGLDLFSFLQTESQHYGPSVITSLDEQDALGHFFQYRGTPSHFLGPLAPTLGSSHCSATPAPPPGRVSSIVAPGGALREGHGGPLPSGPSLTGCRSDIISLD

SEQ ID NO: 2263 - DNA, 637 bp, Rattus norvegicus; identical to SEQ ID NO: 855
  misc_feature (1)..(637): n=a, c, g or t
  ref <308>: DATABASE ACCESSION NUMBER: EMBL / AA799518
  ref <309>: DATABASE ENTRY DATE: 2000-03-03

SEQ ID NO: 2264 - DNA, 418 bp, Rattus norvegicus
  ref <308>: DATABASE ACCESSION NUMBER: EMBL / AI639447
  ref <309>: DATABASE ENTRY DATE: 2000-03-04
tgcttggtgcctaaaaaaagtattttttgaattggcgtccttaaaattttgaaaggactgatagtttacacagttgtgaatggagtagacacagggctttgtgataggatccgaaccacggttttactagggtcagttcctctgacaaggatgaagcggcattatttcatttgacgaggtgcccaaatctgttttcctcgtatgtttcatttcaggtgaattattgagcaaaaactttaaagtgaattcattgtttaaactattcatttttcgtttggtcacaatgtgtaattgtcattcagatcctcgtatcatttcaattgtcttaagatgtatatttctgtactttaattctgctgtttcatgaaaaattctgcctactatttcatgaaaaatcaatttctcaattttaatgtaa

SEQ ID NO: 2265 - DNA, 2982 bp, Homo sapiens
  ref <308>: DATABASE ACCESSION NUMBER: Refseq / NM_013254
  ref <309>: DATABASE ENTRY DATE: 2002-03-26
gccggcggtggcgcggcggagacccggctggtataacaagaggattgcctgatccagccaagatgcagagcacttctaatcatctgtggcttttatctgatattttaggccaaggagctactgcaaatgtctttcgtggaagacataagaaaactggtgatttatttgctatcaaagtatttaataacataagcttccttcgtccagtggatgttcaaatgagagaatttgaagtgttgaaaaaactcaatcacaaaaatattgtcaaattatttgctattgaagaggagacaacaacaagacataaagtacttattatggaattttgtccatgtgggagtttatacactgttttagaagaaccttctaatgcctatggactaccagaatctgaattcttaattgttttgcgagatgtggtgggtggaatgaatcatctacgagagaatggtatagtgcaccgtgatatcaagccaggaaatatcatgcgtgttataggggaagatggacagtctgtgtacaaactcacagattttggtgcagctagagaattagaagatgatgagcagtttgtttctctgtatggcacagaagaatatttgcaccctgatatgtatgagagagcagtgctaagaaaagatcatcagaagaaatatggagcaacagttgatctttggagcattggggtaacattttaccatgcagctactggatcactgccatttagaccctttgaagggcctcgtaggaataaagaagtgatgtataaaataattacaggaaagccttctggtgcaatatctggagtacagaaagcagaaaatggaccaattgactggagtggagacatgcctgtttcttgcagtctttctcggggtcttcaggttctacttacccctgttcttgcaaacatccttgaagcagatcaggaaaagtgttggggttttgaccagttttttgcagaaactagtgatatacttcaccgaatggtaattcatgttttttcgctacaacaaatgacagctcataagatttatattcatagctataatactgctactatatttcatgaactggtatataaacaaaccaaaattatttcttcaaatcaagaacttatctacgaagggcgacgcttagtcttagaacctggaaggctggcacaacatttccctaaaactactgaggaaaaccctatatttgtagtaagccgggaacctctgaataccataggattaatatatgaaaaaatttccctccctaaagtacatccacgttatgatttagacggggatgctagcatggctaaggcaataacaggggttgtgtgttatgcctgcagaattgccagtaccttactgctttatcaggaattaatgcgaaaggggatacgatggctgattgaattaattaaagatgattacaatgaaactgttcacaaaaagacagaagttgtgatcacattggatttctgtatcagaaacattgaaaaaactgtgaaagtatatgaaaagttgatgaagatcaacctggaagcggcagagttaggtgaaatttcagacatacacaccaaattgttgagactttccagttctcagggaacaatagaaaccagtcttcaggatatcgacagcagattatctccaggtggatcactggcagacgcatgggcacatcaagaaggcactcatccgaaagacagaaatgtagaaaaactacaagtcctgttaaattgcatgacagagatttactatcagttcaaaaaagacaaagcagaacgtagattagcttataatgaagaacaaatccacaaatttgataagcaaaaactgtattaccatgccacaaaagctatgacgcactttacagatgaatgtgttaaaaagtatgaggcatttttgaataagtcagaagaatggataagaaagatgcttcatcttaggaaacagttattatcgctgactaatcagtgttttgatattgaagaagaagtatcaaaatatcaagaatatactaatgagttacaagaaactctgcctcagaaaatgtttacagcttccagtggaatcaaacataccatgaccccaatttatccaagttctaacacattagtagaaatgactcttggtatgaagaaattaaaggaagagatggaaggggtggttaaagaacttgctgaaaataaccacattttagaaaggtttggctctttaaccatggatggtggccttcgcaacgttgactgtctttagctttctaatagaagtttaagaaaagtttccgtttgcacaagaaaataacgcttgggcattaaatgaatgcctttatagatagtcacttgtttctacaattcagtatttgatgtggtcgtgtaaatatgtacaatattgtaaatacataaaaaatatacaaatttttggctgctgtgaagatgtaattttatcttttaacatttataattatatgaggaaatttgacctcagtgatcacgagaagaaagccatgaccgaccaatatgttgacatactgatcctctactctgagtggggctaaataagttattttctctgaccgcctactggaaatatttttaagtggaaccaaaataggcatccttacaaatcaggaagactgacttgacacgtttgtaaatggtagaacggtggctactgtgagtggggagcagaaccgcaccactgttatactgggataacaatttttttgagaaggataaagtggcattattttattttacaaggtgcccagatcccagttatccttgtatccatgtaatttcagatgaattattaagcaaacattttaaagtgaattcattattaaaaactattcatttttttcctttggccataaatgtgtaattgtcattaaaattctaaggtcatttcaactgttttaagctgtatatttctttaattctgcttactatttcatggaaaaaaataaatttctcaattttaatgt

SEQ ID NO: 2266 - protein, 729 aa, Homo sapiens
  ref <308>: DATABASE ACCESSION NUMBER: Refseq / NP_037386
  ref <309>: DATABASE ENTRY DATE: 2002-03-26
MQSTSNHLWLLSDILGQGATANVFRGRHKKTGDLFAIKVFNNISFLRPVDVQMREFEVLKKLNHKNIVKLFAIEEETTTRHKVLIMEFCPCGSLYTVLEEPSNAYGLPESEFLIVLRDVVGGMNHLRENGIVHRDIKPGNIMRVIGEDGQSVYKLTDFGAARELEDDEQFVSLYGTEEYLHPDMYERAVLRKDHQKKYGATVDLWSIGVTFYHAATGSLPFRPFEGPRRNKEVMYKIITGKPSGAISGVQKAENGPIDWSGDMPVSCSLSRGLQVLLTPVLANILEADQEKCWGFDQFFAETSDILHRMVIHVFSLQQMTAHKIYIHSYNTATIFHELVYKQTKIISSNQELIYEGRRLVLEPGRLAQHFPKTTEENPIFVVSREPLNTIGLIYEKISLPKVHPRYDLDGDASMAKAITGVVCYACRIASTLLLYQELMRKGIRWLIELIKDDYNETVHKKTEVVITLDFCIRNIEKTVKVYEKLMKINLEAAELGEISDIHTKLLRLSSSQGTIETSLQDIDSRLSPGGSLADAWAHQEGTHPKDRNVEKLQVLLNCMTEIYYQFKKDKAERRLAYNEEQIHKFDKQKLYYHATKAMTHFTDECVKKYEAFLNKSEEWIRKMLHLRKQLLSLTNQCFDIEEEVSKYQEYTNELQETLPQKMFTASSGIKHTMTPIYPSSNTLVEMTLGMKKLKEEMEGVVKELAENNHILERFGSLTMDGGLRNVDCL

SEQ ID NO: 2267 - DNA, 1880 bp, Rattus norvegicus
  ref <308>: DATABASE ACCESSION NUMBER: Refseq / NM_017054
  ref <309>: DATABASE ENTRY DATE: 2000-11-01
gaacaccactgcctaccgctcccaacagtggagacagggctcaggaatgcaggaccaccccacatcccagtgacttctttggctcccgggtgtccaaagctggggtgtggtggcctgcgcctgtcaccccagcttcagaagctgggggcagatgactctcagggagttccaggccagcctggtctacacagtcagagtctgcaggagtgacttacagaattcctgagccttgacattcccaggcccaaagctccttgctgcaaggctgtggaacctgatagggcgcagagacaccaagtgcgccagagcctgcatcagcccaacgtcccagtcacctgcatctgatggggtgttgacccccttatcacgtcaggctcaggagccatgtggctcaacagcacctcgctgggggcatgcttccgcccagtgaacatcacgctgcaggagcgacgtgccatcgcgtcgccatggttcgcggcatccttctgcgcactgggcctggggtccaacctgctggcgctgagtgtgctggccggggcgcgacctggggcgggaccccgctcctccttcctcgctttgctgtgcggcctcgtcctcaccgacttcctggggctgctggtcaccggcgctgtcgtggcgtcgcaacacgccgccttgttggactggcgtgccactgatcccggttgccgcctttgccacttcatgggcgcggccatggtgttcttcgggctgtgtcccctgctcctgggggccgcgatggctgcagagcgcttcgtgggcatcacacggcccttctcacgacccgcagccacgtcgcgccgcgcctgggccactgtggggctggtgtgggtgggggccgggactctcgggctgctgccactgctggggctcggccgctacagtgtgcagtaccccggctcctggtgcttcttgactcttggggcgggacgcggcgacgtggccttcgggctcatgtttgctctcctgggcagcgtgtccgtggggctgtccctcctgctcaacaccgtgagcgtggccacgctctgccgcgtctaccatgcgcgcgaggccacacagcgcccccgggactgtgaggtggagatgatggttcagctcgtaggcatcatggtggtggccacggtgtgttggatgcccttgctggtcttcatcctgcagaccttgctgcagacgctacctgtcatgagcccctccggacagctgttgcggaccacggagcgccaactgctcatctacctacgcgtggccacatggaaccagatcttggacccctgggtctacatcctcttccgtaggtccgtgcttcgacgcctgcatccaaggttcacttcccagctccaggctgtgtccttgcactcaccccccacacaggccatgctcagtggaccctgaaggacggtgccaatcaaagctggggttcttggtgactgctaacgacctgtctcctgtcccaggagcctgaatgtttggtgggatggagttacaacacagggctgactcctgtgaactacaaagatacctcctccatgctagggagatcctccctggccccctccccagactacttgtcagctaggaggttggagcatatgtgggaggtccttgcaggaatctatggttacacagagagaacctggggtgccgatggcatctcccatcttgccatagtccgcgtctgtctcagccccgttgtcccgggcttcatgtttgttcctttaggctcaaggatcatcggccttgggtgttggaagcacccactgtggtccagtagctggctctggagttaccaacctctccgtgtttactgagccccctccccccacggctatccaacacacatgctcaataaatggttgaatgtc

SEQ ID NO: 2268 - protein, 341 aa, Rattus norvegicus
  ref <308>: DATABASE ACCESSION NUMBER: Refseq / NP_058750
  ref <309>: DATABASE ENTRY DATE: 2000-11-01
MWLNSTSLGACFRPVNITLQERRAIASPWFAASFCALGLGSNLLALSVLAGARPGAGPRSSFLALLCGLVLTDFLGLLVTGAVVASQHAALLDWRATDPGCRLCHFMGAAMVFFGLCPLLLGAAMAAERFVGITRPFSRPAATSRRAWATVGLVWVGAGTLGLLPLLGLGRYSVQYPGSWCFLTLGAGRGDVAFGLMFALLGSVSVGLSLLLNTVSVATLCRVYHAREATQRPRDCEVEMMVQLVGIMVVATVCWMPLLVFILQTLLQTLPVMSPSGQLLRTTERQLLIYLRVATWNQILDPWVYILFRRSVLRRLHPRFTSQLQAVSLHSPPTQAMLSGP

SEQ ID NO: 2269 - DNA, 102 bp, Rattus norvegicus
  ref <308>: DATABASE ACCESSION NUMBER: EMBL / AA891998
  ref <309>: DATABASE ENTRY DATE: 2000-03-03
cagttgtacattacacatccgtttaatttttttggtctttgggggtatggaggttgaacctagggccttgcacataataaataagggctcctttgttgtgct

SEQ ID NO: 2270 - DNA, 3413 bp, Rattus norvegicus
  ref <308>: DATABASE ACCESSION NUMBER: EMBL / M58040
  ref <309>: DATABASE ENTRY DATE: 2000-03-04
catagagttcactgacatcatcaagcagctgagccagaatacatatactcctcgtgaggctggatctcagaaagacgagaatcttgcctattatattgaaaatctgttccatgactttaaattcagcaaagtctggcgagatgaacattatgtgaagattcaagtgaaaaacagtgtttctcaaaacttggtgaccataaattcaggtagtaacattgacccagtggaggctcctgagggttatgtggcatttagtaaagctggagaagttactggtaaactggtccatgctaattttggcactaaaaaggactttgaagaattaaattattctgtgaatggatctttagtgattgttagagcagggaaaattacttttgcagaaaaggttgcaaatgcccaaagctttaatgcaattggtgtcctcatctacatggacaggaatacgttccccgttgttgaggcagaccttcaattctttggacatgctcatctaggaactggggatccatatacacctggctttccttctttcaaccatactcagtttccgccatctcagtcatctggattgccttctatacctgtgcagacgatctcaagagctcctgcagaaaagctattcaaaaacatggaaggaaactgtcctcctagttggaatatagattcctcatgtaagctggaactttcacagaatcaaaatgtgaagctcactgtgaacaatgtactgaaagaaacaagaatacttaacatctttggcgttattaaaggctatgaggaaccagaccgctacattgtagtaggagcccagagagacgcttggggccctggtgttgcgaagtccagtgtgggaacaggtcttctgttgaaacttgcccaagtattctcagatatgatttcaaaagatggatttagacccagcaggagtattatctttgccagctggactgcaggagactatggagctgttggtccgactgagtggctggaggggtacctttcatctttgcatctaaaggctttcacttacattaatctggataaagtcgtcctgggtactagcaacttcaaggtttctgccagccccctattatatacacttatggggaagataatgcaggacgtaaagcatccgattgatggaaaatatctatatcgaaacagtaattggattagcaaaattgaggaactttccttggacaatgctgcattcccttttcttgcatattcaggaatcccagcagtttctttctgtttttgtgaggatgaggactatccttatttgggcactaaactagatacctatgagatattaattcagaaagttcctcagctcaaccaaatggttcgtacagcagcagaggtggccggtcagttcattattaaacttacccatgacattgagttgaccctggactatgagatgtacaacagcaaactactgtcatttatgaaggatctgaaccagttcaaagcagatataaaagatatgggtctaagtctacaatggctgtattctgctcgtggagactacttccgtgctacttctagactaacaactgattttcataatgctgagaaaacaaacagattcgtcatgagggaaatcaatgatcgtattatgaaagtggagtatcacttcctgtcaccctatgtatctccaagagagtctcctttccgacacatcttctggggctctggctctcacaccctctcagctttagtggagaacctgagacttcgtcagaaaaatatcactgctttcaatgaaacgctcttcagaaaccagttggccctggctacgtggactattcagggagttgcaaatgccctctctggtgacatttggaatattgacaatgagttttaaatgtaatgtgcataattaagtgagagagggtagtctgtttctagacttgagctggttgtgctaaattttcattagagctcgaattaatgttaaaaattctacccaatcatctaatgtgtttaggcagcagcttttagtgcagggttggacccacacttcaagttacagtggacaacactttccatgttcatgataccttcttagattatctttagaattttgagtcttttgtaataccttgctctttgcttcatggtcatgaaaatgtcagaaccagttgtaagaacattgctataagtcctgagggcactactagtatcttgaggtgggaggaagagggtgtatgtgaggggcagagtggtcgctgggtgtgattccccatctccatctgaccctcactgggattctccaattgagctgtatgcctgaaggatttagctggcttccattcccctaaagtagacagttacttttcagaagaggtgcaacttgttttcttgccagcaaggttgaactaggtccttctgctggataaaagaaaggaagtttgtctgtttacaggaataaggccttattggtttaacctttgtgttatttaggatgagaccagaagccaaagacttcaagttttctctccactgtcatctacccagtagtctttagttctttgggttgttttgtttttgttttgtttttcttttccaacactttctgaaaaagaacaggtttagactcagtctgtcagcagaacacactgccgagctcggtacccggggatcctctagagtcgacctgcaggcatgcaagctttccctatagtgagtcgtattagagcttggtgcatgcctgcaggtcgactctagaggatccccgggtaccgagctctggccaaagtgctggtcttcagggaagctctgtcgtttttggcactgagatatttattgtttatttatcagtgacagagttcactataaatagtgtttttttaatagaagataattatcggaagcagtgccttccataattatgacagttatactgtcgttttcttttaataaaagcagcatctgctaatgagacccacagatactggaagttttgcacttacggtcagcacttgcgggctttagaaaggagaaagccacaagccaaacaatatccgatgagctagaagaggattgggttaaataagagattcctagttgagttggaaaaaaatgataattctaagtccagtgagttgtggccaagttaaatgtcatttaaaggctatgatagtacatcaacaaaattctatagctcagtttattcaagatgtaactcaaatccaattttgcaaaatttccagtacctttgtcacaaacttaactcacattatcgggagcagtgtcttccataatgtataaagaacaaggtagtttttgcctaccacagtgtctatatcggagacagtgacctccatatgttacactaagggtgtacgtaattatcgggaacagtgtttcccataattttcttcatgcgatgacatcttcaaagcttg

SEQ ID NO: 2271 - DNA, 5010 bp, Homo sapiens
  ref <308>: DATABASE ACCESSION NUMBER: Refseq / NM_003234
  ref <309>: DATABASE ENTRY DATE: 2000-10-31
ggcggctcgggacggaggacgcgctagtgtgagtgcgggcttctagaactacaccgaccctcgtgtcctcccttcatcctgcggggctggctggagcggccgctccggtgctgtccagcagccatagggagccgcacggggagcgggaaagcggtcgcggccccaggcggggcggccgggatggagcggggccgcgagcctgtggggaaggggctgtggcggcgcctcgagcggctgcaggttcttctgtgtggcagttcagaatgatggatcaagctagatcagcattctctaacttgtttggtggagaaccattgtcatatacccggttcagcctggctcggcaagtagatggcgataacagtcatgtggagatgaaacttgctgtagatgaagaagaaaatgctgacaataacacaaaggccaatgtcacaaaaccaaaaaggtgtagtggaagtatctgctatgggactattgctgtgatcgtctttttcttgattggatttatgattggctacttgggctattgtaaaggggtagaaccaaaaactgagtgtgagagactggcaggaaccgagtctccagtgagggaggagccaggagaggacttccctgcagcacgtcgcttatattgggatgacctgaagagaaagttgtcggagaaactggacagcacagacttcaccagcaccatcaagctgctgaatgaaaattcatatgtccctcgtgaggctggatctcaaaaagatgaaaatcttgcgttgtatgttgaaaatcaatttcgtgaatttaaactcagcaaagtctggcgtgatcaacattttgttaagattcaggtcaaagacagcgctcaaaactcggtgatcatagttgataagaacggtagacttgtttacctggtggagaatcctgggggttatgtggcgtatagtaaggctgcaacagttactggtaaactggtccatgctaattttggtactaaaaaagattttgaggatttatacactcctgtgaatggatctatagtgattgtcagagcagggaaaatcacctttgcagaaaaggttgcaaatgctgaaagcttaaatgcaattggtgtgttgatatacatggaccagactaaatttcccattgttaacgcagaactttcattctttggacatgctcatctggggacaggtgacccttacacacctggattcccttccttcaatcacactcagtttccaccatctcggtcatcaggattgcctaatatacctgtccagacaatctccagagctgctgcagaaaagctgtttgggaatatggaaggagactgtccctctgactggaaaacagactctacatgtaggatggtaacctcagaaagcaagaatgtgaagctcactgtgagcaatgtgctgaaagagataaaaattcttaacatctttggagttattaaaggctttgtagaaccagatcactatgttgtagttggggcccagagagatgcatggggccctggagctgcaaaatccggtgtaggcacagctctcctattgaaacttgcccagatgttctcagatatggtcttaaaagatgggtttcagcccagcagaagcattatctttgccagttggagtgctggagactttggatcggttggtgccactgaatggctagagggatacctttcgtccctgcatttaaaggctttcacttatattaatctggataaagcggttcttggtaccagcaacttcaaggtttctgccagcccactgttgtatacgcttattgagaaaacaatgcaaaatgtgaagcatccggttactgggcaatttctatatcaggacagcaactgggccagcaaagttgagaaactcactttagacaatgctgctttccctttccttgcatattctggaatcccagcagtttctttctgtttttgcgaggacacagattatccttatttgggtaccaccatggacacctataaggaactgattgagaggattcctgagttgaacaaagtggcacgagcagctgcagaggtcgctggtcagttcgtgattaaactaacccatgatgttgaattgaacctggactatgagaggtacaacagccaactgctttcatttgtgagggatctgaaccaatacagagcagacataaaggaaatgggcctgagtttacagtggctgtattctgctcgtggagacttcttccgtgctacttccagactaacaacagatttcgggaatgctgagaaaacagacagatttgtcatgaagaaactcaatgatcgtgtcatgagagtggagtatcacttcctctctccctacgtatctccaaaagagtctcctttccgacatgtcttctggggctccggctctcacacgctgccagctttactggagaacttgaaactgcgtaaacaaaataacggtgcttttaatgaaacgctgttcagaaaccagttggctctagctacttggactattcagggagctgcaaatgccctctctggtgacgtttgggacattgacaatgagttttaaatgtgatacccatagcttccatgagaacagcagggtagtctggtttctagacttgtgctgatcgtgctaaattttcagtagggctacaaaacctgatgttaaaattccatcccatcatcttggtactactagatgtctttaggcagcagcttttaatacagggtagataacctgtacttcaagttaaagtgaataaccacttaaaaaatgtccatgatggaatattcccctatctctagaattttaagtgctttgtaatgggaactgcctctttcctgttgttgttaatgaaaatgtcagaaaccagttatgtgaatgatctctctgaatcctaagggctggtctctgctgaaggttgtaagtggttcgcttactttgagtgatcctccaacttcatttgatgctaaataggagataccaggttgaaagacctctccaaatgagatctaagcctttccataaggaatgtagcaggtttcctcattcctgaaagaaacagttaactttcagaagagatgggcttgttttcttgccaatgaggtctgaaatggaggtccttctgctggataaaatgaggttcaactgttgattgcaggaataaggccttaatatgttaacctcagtgtcatttatgaaaagaggggaccagaagccaaagacttagtatattttcttttcctctgtcccttcccccataagcctccatttagttctttgttatttttgtttcttccaaagcacattgaaagagaaccagtttcaggtgtttagttgcagactcagtttgtcagactttaaagaataatatgctgccaaattttggccaaagtgttaatcttaggggagagctttctgtccttttggcactgagatatttattgtttatttatcagtgacagagttcactataaatggtgtttttttaatagaatataattatcggaagcagtgccttccataattatgacagttatactgtcggttttttttaaataaaagcagcatctgctaataaaacccaacagatactggaagttttgcatttatggtcaacacttaagggttttagaaaacagccgtcagccaaatgtaattgaataaagttgaagctaagatttagagatgaattaaatttaattaggggttgctaagaagcgagcactgaccagataagaatgctggttttcctaaatgcagtgaattgtgaccaagttataaatcaatgtcacttaaaggctgtggtagtactcctgcaaaattttatagctcagtttatccaaggtgtaactctaattcccatttgcaaaatttccagtacctttgtcacaatcctaacacattatcgggagcagtgtcttccataatgtataaagaacaaggtagtttttacctaccacagtgtctgtatcggagacagtgatctccatatgttacactaagggtgtaagtaattatcgggaacagtgtttcccataattttcttcatgcaatgacatcttcaaagcttgaagatcgttagtatctaacatgtatcccaactcctataattccctatcttttagttttagttgcagaaacattttgtggtcattaagcattgggtgggtaaattcaaccactgtaaaatgaaattactacaaaatttgaaatttagcttgggtttttgttacctttatggtttctccaggtcctctacttaatgagatagcagcatacatttataatgtttgctattgacaagtcattttaatttatcacattatttgcatgttacctcctataaacttagtgcggacaagttttaatccagaattgaccttttgacttaaagcagagggactttgtatagaaggtttgggggctgtggggaaggagagtcccctgaaggtctgacacgtctgcctacccattcgtggtgatcaattaaatgtaggtatgaataagttcgaagctccgtgagtgaaccatcatataaacgtgtagtacagctgtttgtcatagggcagttggaaacggcctcctagggaaaagttcatagggtctcttcaggttcttagtgtcacttacctagatttacagcctcacttgaatgtgtcactactcacagtctctttaatcttcagttttatctttaatctcctcttttatcttggactgacatttagcgtagctaagtgaaaaggtcatagctgagattcctggttcgggtgttacgcacacgtacttaaatgaaagcatgtggcatgttcatcgtataacacaatatgaatacagggcatgcattttgcagcagtgagtctcttcagaaaacccttttctacagttagggttgagttacttcctatcaagccagtacgtgctaacaggctcaatattcctgaatgaaatatcagactagtgacaagctcctggtcttgagatgtcttctcgttaaggagtagggccttttggaggtaaaggtata

SEQ ID NO: 2272 - protein, 760 aa, Homo sapiens
  ref <308>: DATABASE ACCESSION NUMBER: Refseq / NP_003225
  ref <309>: DATABASE ENTRY DATE: 2000-10-31
MMDQARSAFSNLFGGEPLSYTRFSLARQVDGDNSHVEMKLAVDEEENADNNTKANVTKPKRCSGSICYGTIAVIVFFLIGFMIGYLGYCKGVEPKTECERLAGTESPVREEPGEDFPAARRLYWDDLKRKLSEKLDSTDFTSTIKLLNENSYVPREAGSQKDENLALYVENQFREFKLSKVWRDQHFVKIQVKDSAQNSVIIVDKNGRLVYLVENPGGYVAYSKAATVTGKLVHANFGTKKDFEDLYTPVNGSIVIVRAGKITFAEKVANAESLNAIGVLIYMDQTKFPIVNAELSFFGHAHLGTGDPYTPGFPSFNHTQFPPSRSSGLPNIPVQTISRAAAEKLFGNMEGDCPSDWKTDSTCRMVTSESKNVKLTVSNVLKEIKILNIFGVIKGFVEPDHYVVVGAQRDAWGPGAAKSGVGTALLLKLAQMFSDMVLKDGFQPSRSIIFASWSAGDFGSVGATEWLEGYLSSLHLKAFTYINLDKAVLGTSNFKVSASPLLYTLIEKTMQNVKHPVTGQFLYQDSNWASKVEKLTLDNAAFPFLAYSGIPAVSFCFCEDTDYPYLGTTMDTYKELIERIPELNKVARAAAEVAGQFVIKLTHDVELNLDYERYNSQLLSFVRDLNQYRADIKEMGLSLQWLYSARGDFFRATSRLTTDFGNAEKTDRFVMKKLNDRVMRVEYHFLSPYVSPKESPFRHVFWGSGSHTLPALLENLKLRKQNNGAFNETLFRNQLALATWTIQGAANALSGDVWDIDNEF

SEQ ID NO: 2273 - DNA, 3115 bp, Rattus norvegicus
  ref <308>: DATABASE ACCESSION NUMBER: Refseq / NM_031135
  ref <309>: DATABASE ENTRY DATE: 2003-01-13
ggagggaacacggtgcctcgggttgtgtacacgctccactgacagagcttcttgcagccgggcagccgctgatcacgcgtggccccgccagcccattggctgaggcctcacacacctttgccgctgattggtcgataccacgccccgccttccaccccgcccgcggcgcggggcaggcagagcggctacctgcatggggagggggggcagacagcgcggagcgcggtggcgtcgacgtctagtgtctcagtgctccgtctgtggctaggcagccagcagccaagcagctcgcgacctacggccaggcagccaaccatgcttaacttcggcgcttctctccagcaagcttcggaggggaaaatggaactaatttctgaaaagtccaaagagggagcacatccctgggacaaagctgaacagagtgactttgaagctgtggaagcgctcatgtccatgagctgcgactggaagtctcacttcaagaaataccttgaaaacaggcctgtcacaccagtgtctgatacctcagaggaagacagtttgcttccagggacgcctgaccttcagaccgtcccagcattctgtttgactccaccttacagcccctctgacttcgaaccctcgcaggggtcaaatctgacggcaccagcgccacctactggtcacttcagatcgctctccgatgctgccaagcctcccagcatcgctccttttaaagaggaggaaaagagcccattagctgcccctcccctccctaaggctcaagccaccagtgtcatccgtcacacagctgatgcccaactctgtaaccaccagtcctgccctgtgaaagcagctagcatcctcaactaccaggacaattctttccggagaagaacccacataaatgtcgaggctactcgaaagaacataccctgtgctgctgtgtcaccaaacagacccaagcctgagcccagcacagcggcgaatggcgctgagaaggccggcactgcgccgtatgactttgctgtgccttcctcagagacagtcatctgtaggtcttctcagccagctcccacgtccccagtacagaagtcagtactgatgtcttcacctacagtgtccactgggggagtgccacccttgcctgtcatctgccagatggttccccttccagcaaacaactctctcgttaccacagttgtccccagcagtccgcccagccagccacccgctgtctgctcacccgtgttgttcatgggcactcaggtgcccaagggcacggtcatgtttgtggtaccccagcccgttgtacagagcccaaagcctccagtggtgagccccaatggcaccagactgtctcccattgcccctgcgcctggattctctccttcagcagcaagggttactccccagattgattcgtccagagtaagaagtcacatctgtagccacccaggatgtggcaagacttactttaaaagttcccatctgaaggcccacgtgagaacacacacaggggaaaaacctttcagctgcagctggaaaggctgtgaaaggaggtttgctcgttccgatgaactgtccagacaccggcggacacacacaggtgagaagaaatttgcctgtcccatgtgtgaccgtcggttcatgagaagtgaccatttaaccaaacatgcccggcgacacctatcagccaagaagctgccaaactggcaaatggaagtgagcaagttaaatgacatcgctctgcctccggccacagcgtcggcacagtgacggccagaagatggagactcagaataaactttggtcagagtcgagccggtgaccgtgtcaaatgcttctgcaagtctgcggccctccaacagggcctaaagcagaagcccctggcctggggggaggcccagcctgggttagatgacgagaagtgcttcagccacaggcagttcacagaagggcggggttcatttcttaccacgtagagagatgagaacactcgtgtcccttgagtagttttggaaggtttcggatgagatgagcacagcacaggttttgaatcacatacacatcaggtactttgtttttgccatttatacttgagaccagctttgcagtgtgattcttttaaagcgttggtttcgagaatatagaggctgaaattacggtacagaaatgcagctagaaagtgagtttgtgtcatcttctcctagagttatcttgcttattattcctagtctttacagtcaactccgtggacgtggctaagtatagaaaactatcatttcttccactgttgttggtatttgaggttgaacagctgtacattgctaaggggagcccaaggattggaactctcattaatttaattgcttggaagtgcagctaaagttcttttttttggccttttgttttgaaagtttaggcattttactctaccttagatattagtttgcttgcagttttttgtgtagatttgaaaactgtacaccaatgtgtttcctatagacttaagatacgctgcgctttgtttagaaaacaatctggcagtgaaaatatgtgtcgtaaagaagagatgtcaagaatttgagatgactccttgagaaagatggcttatgtcatcagcaaaggacacttacgtcagacgtacactgtttctatcaaatcaggaagttagtgaccatcacagatggacaggtgtccttttatttataggagtttgtcaggatgtctgagtagataggtaggaaattgttactagaacattcacttccgacttgacaaggatattcatggtgcagatacgttcttcctgccgctgcagtgtctgggtgtccgggaaactccgagactttaaagtgtcataatgtggtcacacctgcagttctggggatccagagccttgcttgtgttctgtaagctctgtcaccgagttgtatccccacctgaaagcagtgacttttgctaacagtatttctgttctgttgtaaagtggatagaagacacacttggtagtaaaggtaaattattcaaagtccacagtgaaaaactcaccataccttcccatttaaaccgtttctgtatctcataggtttctgacatgcaaacttgaacccttgaaaaaaagagttttctt

SEQ ID NO: 2274 - protein, 480 aa, Rattus norvegicus
  ref <308>: DATABASE ACCESSION NUMBER: Refseq / NP_112397
  ref <309>: DATABASE ENTRY DATE: 2003-01-13
MLNFGASLQQASEGKMELISEKSKEGAHPWDKAEQSDFEAVEALMSMSCDWKSHFKKYLENRPVTPVSDTSEEDSLLPGTPDLQTVPAFCLTPPYSPSDFEPSQGSNLTAPAPPTGHFRSLSDAAKPPSIAPFKEEEKSPLAAPPLPKAQATSVIRHTADAQLCNHQSCPVKAASILNYQDNSFRRRTHINVEATRKNIPCAAVSPNRPKPEPSTAANGAEKAGTAPYDFAVPSSETVICRSSQPAPTSPVQKSVLMSSPTVSTGGVPPLPVICQMVPLPANNSLVTTVVPSSPPSQPPAVCSPVLFMGTQVPKGTVMFVVPQPVVQSPKPPVVSPNGTRLSPIAPAPGFSPSAARVTPQIDSSRVRSHICSHPGCGKTYFKSSHLKAHVRTHTGEKPFSCSWKGCERRFARSDELSRHRRTHTGEKKFACPMCDRRFMRSDHLTKHARRHLSAKKLPNWQMEVSKLNDIALPPATASAQ

SEQ ID NO: 2275 - DNA, 2899 bp, Homo sapiens
  ref <308>: DATABASE ACCESSION NUMBER: Refseq / NM_005655
  ref <309>: DATABASE ENTRY DATE: 2000-11-01
cagacggcgctgagcgcggcggcggcgggagcggcgtcgagtgtctccgtgcgcccgtctgtggccaagcagccagcagcctagcagccagtcagcttgccgccggcggccaagcagccaaccatgctcaacttcggtgcctctctccagcagactgcggaggaaagaatggaaatgatttctgaaaggccaaaagagagtatgtattcctggaacaaaactgcagagaaaagtgattttgaagctgtagaagcacttatgtcaatgagctgcagttggaagtctgattttaagaaatacgttgaaaacagacctgttacaccagtatctgatttgtcagaggaagagaatctgcttccgggaacacctgattttcatacaatcccagcattttgtttgactccaccttacagtccttctgactttgaaccctctcaagtgtcaaatctgatggcaccagcgccatctactgtacacttcaagtcactctcagatactgccaaacctcacattgccgcacctttcaaagaggaagaaaagagcccagtatctgcccccaaactccccaaagctcaggcaacaagtgtgattcgtcatacagctgatgcccagctatgtaaccaccagacctgcccaatgaaagcagccagcatcctcaactatcagaacaattcttttagaagaagaacccacctaaatgttgaggctgcaagaaagaacataccatgtgccgctgtgtcaccaaacagatccaaatgtgagagaaacacagtggcagatgttgatgagaaagcaagtgctgcactttatgacttttctgtgccttcctcagagacggtcatctgcaggtctcagccagcccctgtgtccccacaacagaagtcagtgttggtctctccacctgcagtatctgcagggggagtgccacctatgccggtcatctgccagatggttccccttcctgccaacaaccctgttgtgacaacagtcgttcccagcactcctcccagccagccaccagccgtttgcccccctgttgtgttcatgggcacacaagtccccaaaggcgctgtcatgtttgtggtaccccagcccgttgtgcagagttcaaagcctccggtggtgagcccgaatggcaccagactctctcccattgcccctgctcctgggttttccccttcagcagcaaaagtcactcctcagattgattcatcaaggataaggagtcacatctgtagccacccaggatgtggcaagacatactttaaaagttcccatctgaaggcccacacgaggacgcacacaggagaaaagcctttcagctgtagctggaaaggttgtgaaaggaggtttgcccgttctgatgaactgtccagacacaggcgaacccacacgggtgagaagaaatttgcgtgccccatgtgtgaccggcggttcatgaggagtgaccatttgaccaagcatgcccggcgccatctatcagccaagaagctaccaaactggcagatggaagtgagcaagctaaatgacattgctctacctccaacccctgctcccacacagtgacagaccggaaagtgaagagtcagaactaactttggtctcagcgggagccagtggtgatgtaaaaatgcttccactgcaagtctgtggccccacaacgtgggcttaaagcagaagccccacagcctggcacgaaggccccgcctgggttaggtgactaaaagggcttcggccacaggcaggtcacagaaaggcaggtttcatttcttatcacataagagagatgagaaagcttttattcctttgaatattttttgaaggtttcagatgaggtcaacacaggtagcacagattttgaatctgtgtgcatatttgttactttacttttgctgtttatacttgagaccaacttttcaatgtgattcttctaaagcactggtttcaagaatatggaggctggaaggaaataaacattacggtacagacatggagatgtaaaatgagtttgtattattacaaatattgtcatctttttctagagttatcttctttattattcctagtctttccagtcaacatcgtggatgtagtgattaaatatatctagaactatcatttttacactattgtgaatatttggaattgaacgactgtatattgctaagagggcccaaagaattggaatcctccttaatttaattgctttgaagcatagctacaatttgtttttgcatttttgttttgaaagtttaacaaatgactgtatctaggcatttcattatgctttgaactttagtttgcctgcagtttcttgtgtagatttgaaaattgtataccaatgtgttttctgtagactctaagatacactgcactttgtttagaaaaaaaactgaagatgaaatatatattgtaaagaagggatattaagaatcttagataacttcttgaaaaagatggcttatgtcatcagtaaagtacctttatgttatgaggatataatgtgtgctttattgaattagaaaattagtgaccattattcacaggtggacaaatgttgtcctgttaatttataggagttttttggggatgtggaggtagttgggtagaaaaattattagaacattcacttttgttaacagtatttctcttttattctgttatatagtggatgatatacacagtggcaaaacaaaagtacattgcttaaaatatatagtgaaaaatgtcactatatcttcccatttaacattgtttttgtatattgggtgtagatttctgacatcaaaacttggacccttggaaaacaaaagttttaattaaaaaaaatccttgtgacttacaatttgcacaatatttcttttgttgtactttatatcttgtttacaataaagaattc

SEQ ID NO: 2276 - protein, 480 aa, Homo sapiens
  ref <308>: DATABASE ACCESSION NUMBER: Refseq / NP_005646
  ref <309>: DATABASE ENTRY DATE: 2000-11-01
MLNFGASLQQTAEERMEMISERPKESMYSWNKTAEKSDFEAVEALMSMSCSWKSDFKKYVENRPVTPVSDLSEEENLLPGTPDFHTIPAFCLTPPYSPSDFEPSQVSNLMAPAPSTVHFKSLSDTAKPHIAAPFKEEEKSPVSAPKLPKAQATSVIRHTADAQLCNHQTCPMKAASILNYQNNSFRRRTHLNVEAARKNIPCAAVSPNRSKCERNTVADVDEKASAALYDFSVPSSETVICRSQPAPVSPQQKSVLVSPPAVSAGGVPPMPVICQMVPLPANNPVVTTVVPSTPPSQPPAVCPPVVFMGTQVPKGAVMFVVPQPVVQSSKPPVVSPNGTRLSPIAPAPGFSPSAAKVTPQIDSSRIRSHICSHPGCGKTYFKSSHLKAHTRTHTGEKPFSCSWKGCERRFARSDELSRHRRTHTGEKKFACPMCDRRFMRSDHLTKHARRHLSAKKLPNWQMEVSKLNDIALPPTPAPTQ

SEQ ID NO: 2277 - DNA, 939 bp, Rattus norvegicus
  ref <308>: DATABASE ACCESSION NUMBER: Refseq / NM_031769
  ref <309>: DATABASE ENTRY DATE: 2003-01-13
atggagggcgaatgccgggtgctctccatccagagccatgttgtccgcggctacgtgggcaacagagcggccatgttccctctgcaggttttgggatttgaggttgatgccgtgaactctgtgcagttttcaaaccacacaggctatgcccactggaaggggcaggtgctgacgtcccaggagctgcatgcgctgtacgaaggtctcaaggcaaacaatgtcaacaagtatgactacgtgctcactggttacacgagagacaagtccttcctgggcatggtggtggatatcgtgcaggagctgaagcaacagaactctcgactcgtgtacgtgtgcgaccctgtgatgggcgacaagtggaacggagaaggctccatgtacgttccccaggacctgcttcccgtgtacagggagaaagtggtacccatggccgacatcatcactcccaaccagtttgaggctgagttgctgagtggcagaaaaatccacagccaagaagaagcatttgcggtgatggatgtgttgcaccgcatgggtcctgacactgtggtcatcaccagctctgacctcccctcccccaaaggcagcgactacctgatggcgctgggaagccagaggatgaggaagcctgatggctccacagtgacccagcgcatccggatggagatgcgcaaggtggatcccgtcttcgtgggcaccggggacctcttcgctgccatgcttctggcgtggacacacaaacaccccgacaacctcaaggtggcctgtgagaaaacggtgtctgccatgcagcatgtcctgcagaggaccatccggtgtgcaaaagccgaagcaggagaaggacagaagcccagcccggctcagctggagctgagaatggtgcagagcaggaaggacatcgaggaccccgagatcgtcgtgcaggccacggtgctgtga

SEQ ID NO: 2278 - protein, 312 aa, Rattus norvegicus
  ref <308>: DATABASE ACCESSION NUMBER: Refseq / NP_113957
  ref <309>: DATABASE ENTRY DATE: 2003-01-13
MEGECRVLSIQSHVVRGYVGNRAAMFPLQVLGFEVDAVNSVQFSNHTGYAHWKGQVLTSQELHALYEGLKANNVNKYDYVLTGYTRDKSFLGMVVDIVQELKQQNSRLVYVCDPVMGDKWNGEGSMYVPQDLLPVYREKVVPMADIITPNQFEAELLSGRKIHSQEEAFAVMDVLHRMGPDTVVITSSDLPSPKGSDYLMALGSQRMRKPDGSTVTQRIRMEMRKVDPVFVGTGDLFAAMLLAWTHKHPDNLKVACEKTVSAMQHVLQRTIRCAKAEAGEGQKPSPAQLELRMVQSRKDIEDPEIVVQATVL

SEQ ID NO: 2279 - DNA, 1331 bp, Homo sapiens
  ref <308>: DATABASE ACCESSION NUMBER: Refseq / NM_003681
  ref <309>: DATABASE ENTRY DATE: 2002-11-05
cggagccgcccgctgaggtcagaaggaggcgtctgcgctgatcgggtccgccgcgcgccagagccagagtcgcagccgaggggagccggggccggagcccgagcccgagccgagccggagcccgagcgagcggcggagaccgtgcccccgcctcggccccgcgccgccgcggccaggcccggcatggaggaggagtgccgggtgctctccatacagagccacgtcatccgcggctacgtgggcaaccgggcggccacgttcccgctgcaggttttgggatttgagattgacgcggtgaactctgtccagttttcaaaccacacaggctatgcccactggaagggccaagtgctgaattcagatgagctccaggagttgtacgaaggcctgaggctgaacaacatgaataaatatgactacgtgctcacaggttatacgagggacaagtcgttcctggccatggtggtggacattgtgcaggagctgaagcagcagaaccccaggctggtgtacgtgtgtgatccagtcttgggtgacaagtgggacggcgaaggctcgatgtacgtcccggaggacctccttcccgtctacaaagaaaaagtggtgccgcttgcagacattatcacgcccaaccagtttgaggccgagttactgagtggccggaagatccacagccaggaggaagccttgcgggtgatggacatgctgcactctatgggccccgacaccgtggtcatcaccagctccgacctgccctccccgcagggcagcaactacctgattgtgctggggagtcagaggaggaggaatcccgctggctccgtggtgatggaacgcatccggatggacattcgcaaagtggacgccgtctttgtgggcactggggacctgtttgctgccatgctcctggcgtggacacacaagcaccccaataacctcaaggtggcctgtgagaagaccgtgtctaccttgcaccacgttctgcagaggaccatccagtgtgcaaaagcccaggccggggaaggagtgaggcccagccccatgcagctggagctgcggatggtgcagagcaaaagggacatcgaggacccagagatcgtcgtccaggccacggtgctgtgagggccccgccgcttgcccgtgacacgcagcgcgttggtgtctccgtgtttgtccctgtgaaaacatgtaacgtctgccttagagccatgaccgaaacttgatatttttttctttcatgagtgtccggcatctgctggtcttcattgtgaaacgtgccagtcgtgctttgtgaaaaataacaaagtggtcacaaaaaaaaaaaaaaaaaa

SEQ ID NO: 2280 - protein, 312 aa, Homo sapiens
  ref <308>: DATABASE ACCESSION NUMBER: Refseq / NP_003672
  ref <309>: DATABASE ENTRY DATE: 2002-11-05
MEEECRVLSIQSHVIRGYVGNRAATFPLQVLGFEIDAVNSVQFSNHTGYAHWKGQVLNSDELQELYEGLRLNNMNKYDYVLTGYTRDKSFLAMVVDIVQELKQQNPRLVYVCDPVLGDKWDGEGSMYVPEDLLPVYKEKVVPLADIITPNQFEAELLSGRKIHSQEEALRVMDMLHSMGPDTVVITSSDLPSPQGSNYLIVLGSQRRRNPAGSVVMERIRMDIRKVDAVFVGTGDLFAAMLLAWTHKHPNNLKVACEKTVSTLHHVLQRTIQCAKAQAGEGVRPSPMQLELRMVQSKRDIEDPEIVVQATVL

SEQ ID NO: 2281 - DNA, 538 bp, Rattus norvegicus
  ref <308>: DATABASE ACCESSION NUMBER: EMBL / AF038571
  ref <309>: DATABASE ENTRY DATE: 1998-07-02
gggaagatcatagaagttgaagactgggaaattttctgcaagttgggcctttatatggccactgtcctgagtgggcttgcaatccactccctcgtagtgctgccactgatctatttcatagtcgtgcggaagaaccctttccgctttgccttgggcatggcgcaggctctcctgacagctctcatgatctcatctagctcggcaacccttccagttacattccgctgtgcggaagaaaagaaccacgtggacaagaggatcacaagatttgtgctgcccgtcggcgccaccatcaacatggacggcactgcgctctatgaagccgtggcagctgtgttcattgcgcagctgaacggcatggacctgagcattgggcagatcatcacgatcagcatcacagccaccgctgctagcattggagctgccggtgtgccccaggctggcctggtgaccatggtgatcgtgttgagtgccgtggggctgcctgctgaggacgtcaccctcatcattgccgtcgactggctcctggaccggttca

SEQ ID NO: 2282 - DNA, 3864 bp, Rattus norvegicus; identical to SEQ ID NO: 2184
  ref <308>: DATABASE ACCESSION NUMBER: Refseq / NM_019225
  ref <309>: DATABASE ENTRY DATE: 2003-01-13

SEQ ID NO: 2283 - protein, 543 aa, Rattus norvegicus; identical to SEQ ID NO: 2185
  ref <308>: DATABASE ACCESSION NUMBER: Refseq / NP_062098
  ref <309>: DATABASE ENTRY DATE: 2003-01-13

SEQ ID NO: 2284 - DNA, 2633 bp, Rattus norvegicus; identical to SEQ ID NO: 1243
  ref <308>: DATABASE ACCESSION NUMBER: Refseq / NM_013174
  ref <309>: DATABASE ENTRY DATE: 2003-01-14

SEQ ID NO: 2285 - protein, 412 aa, Rattus norvegicus; identical to SEQ ID NO: 1244
  ref <308>: DATABASE ACCESSION NUMBER: Refseq / NP_037306
  ref <309>: DATABASE ENTRY DATE: 2003-01-14

SEQ ID NO: 2286 - DNA, 566 bp, Rattus norvegicus
  misc_feature (1)..(566): n=a, c, g or t
  ref <308>: DATABASE ACCESSION NUMBER: EMBL / AA799529
  ref <309>: DATABASE ENTRY DATE: 2000-03-03
aaggaatatagcatttttattaactactttaagtagaacaaactaaatacatatttaacagttttggttcatttatacagtacattaaataagttatgcacagagttaagtaacaaaagttcctattgagtcaaatgacaaagcacagaaaaaccagactcaaatgcatcctgccggtgacttcacattcatctgctgcctctgcaaaccatgcttgcaggattggcttttatttacattattggttttctgtagggatggagccgttgtagcctcatcaggaacttggaaagccacaggagtggaatgaaggccttatatcaaacagccctttaaccattcgctggattgttacagcttcttccaggcaactccaagccagggactaggctgtccctgactgcagctgcacatgccctttttggcataagcactgacagtttacactgggcagcaggaggtctgacaagacggggtctaagcggaagtaccgcctcttgggctgtggaagggaagatggtgaaattatcnaaccacatctcggctttctcctggctcacacttgc

SEQ ID NO: 2287 - DNA, 6406 bp, Homo sapiens
  ref <308>: DATABASE ACCESSION NUMBER: Refseq / NM_005093
  ref <309>: DATABASE ENTRY DATE: 2003-02-28
caccaggtgaatggctaaagaatctggaataagcttgaaagaaatacaggtcctggcaaggcaatggaaagttggtcctgagaaaagggtgccagcgatgcctggatcgcctgtggaagtgaagatacagtccagatcctcacctcccaccatgccacccctcccaccaataaatcctggaggaccgaggccagtgtccttcactcctactgcattaagcaatggcatcaaccattctcctcctaccctgaatggtgccccatcaccgccacagagattcagcaatggtcctgcctcctccacatcatctgcactcacaaatcagcaattgccagccacttgtggtgctcgacaactcagcaagttgaaacgctttcttaccactctgcaacagtttggcaatgacatctcccctgagattggggagaaggtgcggactcttgttcttgcactggtgaactcaacagtgacaattgaggaattccactgtaagctccaagaagccacaaactttccccttcgtccttttgtgattccatttctcaaggccaacctgcccctgctgcagcgggaactgctgcactgcgctcgggcggccaagcagaccccatcccagtacctggctcagcacgaacaccttctgctcaacacaagcattgcatcgcctgctgactcgtcagagttgctcatggaggtgcacggaaatgggaagaggcccagtccagagaggagagaagagaatagttttgatagagacacaattgctcctgagcctcctgccaagagagtatgtaccatcagccctgctcctcggcacagtcctgctctcactgtgcccctcatgaatcccgggggccaattccatcctacccctccacctcttcagcattacaccttagaggatattgcaacttctcacctgtatcgggaacccaacaagatgctagagcatcgagaagttcgtgatagacaccacagtcttggtctaaatggaggctatcaagatgagttggtagatcatcgtttgacagaaagggaatgggctgatgaatggaaacatcttgaccatgcgctgaattgcattatggaaatggtagagaaaacaaggcgctctatggcagttctgcggcgctgtcaggaatcagatcgtgaagaactcaactactggaaaagacggtacaatgaaaacacagagctgaggaaaacggggaccgagttggtctccaggcagcacagccctgggagtgcagattctctcagcaatgattctcagagagagttcaacagcaggccaggtacaggatacgtacctgtggagttttggaaaaaaacagaagaagctgtgaataaggtgaaaattcaggccatgtcagaagtacagaaggccgtcgctgaggcagagcagaaagcctttgaagtgattgcaacagagagagcacgaatggagcaaaccatagcggatgtcaagcggcaggccgcagaggatgctttcctcgtcatcaatgagcaagaggagtccacggagaactgctggaactgtggccgcaaagccagcgagacatgcagtggctgcaatatcgcgcgatactgtggctctttctgccagcacaaggactgggagcggcaccaccgcctctgtggtcagaacctgcatggccagagcccccacggccagggccggccgctgcttcctgtaggcaggggctcctctgccaggtccgccgactgcagcgtgcccagcccagccctcgacaagacctcggcaaccacatcgcgttcctcaacacctgcttctgtgacagctatcgacaccaacggactctgagccccggactctgcttaccctgatggctgctcagcaccacagagtgcttgggctgagggactgactgttggaacccgtgcatgtagctgccgggtcatcagcaagaaatgaattggaggcaggaagagtccaagcctgaataataacaccccacagcctctctgtgcacttgctgtctgcggagccagtgtgccattctctgcacatgggcagccagcctgagctgcctcctccatggctttcctggtttgttcctctctccactgaagctgacttagccggccccttttcagtgtagaccaccagctcccctccccatctccttgagtcagcagactgtccaatgtgctcagccaggctggaggcggcaggcggcaggcagcaggctgtggaggaggcccctcggtcagggagcggcctgcctcacccctgaatagctccttcggccccatctccatcctcagcagatgacactgattggcctcacggggacttgggtaagcaacaggcggcattcaggactcttctcaaccctgctgttcagacttgataagatctcagagtccacaggaaagaagtcactgttgcaataaaagcacccgtagtagcaaaaacataaacaaataaaacttcccccacatcacagatgattttggacaagattttccaaccttgctggctactttagtttgggacctgttttttttctcatttgattttgcttgtgcagaaaatagtttccagcacatggattgatctgagagagaatgaggctcagttgtggatagtctgttttctctgagcatgttggccaactagtatcgtcaaattattgagtggatcatctcttggaaatgcagaacttctgccaccacttggctatttgcacagtcatcttgttctgtgtccttttatctctcagaccacacacatctggaacgctgtgggcatcttctgcccatgggctccatttggcacctgctgagccacagttgtcctgctggatgtgctgtgcaggttggtaggacttgcccccactgtcaaggcctggtctcatctgaaaagccctcctggacctcaaagaattcttcagacctcatagttacaggtcattatatctactatgttgatttatcatcaggcacacaacttctgtttccttctcttgtgttatctgatagcgtccctccttgagctcatcagaaaggttttatgaaatgtgaaccattttgggaaaagctgatcaatttttcttcctagcttcccattttcaaatgggacatcactcatatccctttcagaatgttaggaactgcctcccacattcttccctgtctttttgggttttgttttttgttgttgttgtggttttttaacacaaagcctgggcaacagagcaaaactctgtctcaaaaaaaaaaaaaaaaaggcaaaattaaagaatttcaagtccctaatttactctaaccaagcattttcagtcttacaaagaaatctagtgcacgacacctttaaaatgcctagatttccattgcctaaagtaaggtgtgaccagtgaaacaacagcagagaatcatgttcctttgctgtggaacacataagccccacagttttccagtcagcctaatacatgggtatcccccgaccccatctgcctccttaagccacagtccttggtggggaactctaagggggacggagtcagtaccccggacagggccacatttgcatgagacatggctgtctcacaggtcacagagccattacaacagcttactagtttttcatggatttgttggattaacaccttaagcaggttttttattgttattttgtttgtttgtttgttttgagacgggagtttctctcttgtctcccaggctggagtgcaatcgcgcaatctcggctcacggtaacctctgcctcccaggttcgggcgagtctcctgcctcagccttctgagtagctgggattgcaggcatgcgccaccacgcccaactgattttgtatttttagtggagacggggtttctccttgttggtcaggctggtctcaaaccccggacctcaggtgatccccccaccttggcctcccaaagtgccaggattacaggcatgagccactgtgtccggtcttgagcaggtttttaaaatctccagtggccataaaactagccagggtagctcatgcttttactggttggaataaggagccaaaaccaacaaaataatatttattagggttggatgcccatttctgtggttaaggcttaggtttggtgtgcagagcctggcctgctcttgtgggctgtggttgctgtgacagtttcgttttctgaatctttgtaatgctcttccaccctgctcgtgctgcccagaggctgatctgcaaacctgggcagtattccacactgaagctcagtttgcaaaccttctgctgtgttaattctggtcagtttcacacagaagtcacgagggcctctgcccaggaccttctattcacatttcaagaatccctttctgaaattctccaactctctggtcaggaggaggagcaccattggggcggggtaggcagctagaggcgcaggagcgaatccaggttccttgcgtggttcccagcctctgctgacagcacctcagctaccaggtggggagtggaaattcagcctgcttagaggactgacctctacagttcatatttgcagtgacataaaaggcaaagaggagctggcatggtggtacagaaggtatcagtcaagcgcaggctcttcagaaacctagaaactaaaaagagatgcaacatgtgactggccatcagccagacatgtctagggtgagaccagtgctcagcaccacccgccaaggaacactgatgagttgtgggacattatggtcggccaagtgaggaatgattgcagggaccagagaagaccaaagatgccagatgtccccagagtttcttgagggctgggtttcacgtctttgcttgtcctttttgtccccacttgcctgcaccgtgcctgactcatccagtggggaaggtgactcaagaagttgtttaagcctaggcctaggcagtccacttcgggaggtgggggcactccacactggggggccctgcagctccagggctggtgctctagcagatccgctcaggcacggttgggtgaccgtggggtcaccgattgcgtagattatttctagggcagtgctgggttagaaatgtctgtctggaaacaggacacatcttgccaccacaagtccacacctggccttggctgctgcccgctctctgcagcgtggatttcctttgcccatttgggccagaaggtcaccaggagttcatcactgcttagtgtcaacttgacatcttcagcttccagacagaaaacccatgctttactttgtacagccctgtcccagagttagtaagcctcggcttgtcacctgcttgcaaagggtatagacatcattctgggtagttctagaggatatcgcaacaagtgcgtttgaaggttcagcacagctggaattgtacggtagtgagctcttcaaaatgaaaacagaatgaccggatggccatctgtcctggaaactgtagaattgaataaatcactgaaaatagaacacttcttggaggctttcttcagaactgaactagaaacaaggtttccaggctcccaggtcagtagaccaaaccaacttccttagatttttttttttaagctgtttgcagaaaactgggtggtagcgtgtctgaaccaaacggaagaatagccagcggagcatggactgttccagcacgggccagatggccagctgtcgagagcagccctgcccagattgcggtgggggctgtgccagcggctccgcagggcccttccaactctggagtgtctgtagttcttgtgaaaccaaaacgttgactacctgcctctttcctcgggcatcgacgtgctcatttccaaagatgatggtgcaggtgaccttttccatcgtgagctaagagaaggttaggaggcctgaggggcgggccttgtgtcccctcctccccctccacagcccctgaggtggagcttccctcacagaccccatctggtcgagcctacggctgcccagtgtacactcagtgatgcttataccaaatagggcatgtgcgctggtgtctgttggggacagccccatccctaccttggagtcggcagagaagcagcaataagcattaggcgaatgattgaaagggctgctgcgccaagaggccttcagtccccttaacgtggctttccaacttcctgacgaggctacaaaggctccgctcacaaaagaaagccaataatgtaaataaatagaaaacgaagcctccacgcgtggtttttaaagggggatgatgaatgtgacaccacccacagaatgcattagaatctggtttttctgtgctttgtcattttactctgataggaatttttgttacctaactctgtgcataacttatttaatgtactgtataaatgaaccaaaactgttaaatatgtatttagtttgttctacttaaagtagtcaataaaaaggctatattcct

SEQ ID NO: 2288 - protein, 604 aa, Homo sapiens
  ref <308>: DATABASE ACCESSION NUMBER: Refseq / NP_005084
  ref <309>: DATABASE ENTRY DATE: 2003-02-28
MAKESGISLKEIQVLARQWKVGPEKRVPAMPGSPVEVKIQSRSSPPTMPPLPPINPGGPRPVSFTPTALSNGINHSPPTLNGAPSPPQRFSNGPASSTSSALTNQQLPATCGARQLSKLKRFLTTLQQFGNDISPEIGEKVRTLVLALVNSTVTIEEFHCKLQEATNFPLRPFVIPFLKANLPLLQRELLHCARAAKQTPSQYLAQHEHLLLNTSIASPADSSELLMEVHGNGKRPSPERREENSFDRDTIAPEPPAKRVCTISPAPRHSPALTVPLMNPGGQFHPTPPPLQHYTLEDIATSHLYREPNKMLEHREVRDRHHSLGLNGGYQDELVDHRLTEREWADEWKHLDHALNCIMEMVEKTRRSMAVLRRCQESDREELNYWKRRYNENTELRKTGTELVSRQHSPGSADSLSNDSQREFNSRPGTGYVPVEFWKKTEEAVNKVKIQAMSEVQKAVAEAEQKAFEVIATERARMEQTIADVKRQAAEDAFLVINEQEESTENCWNCGRKASETCSGCNIARYCGSFCQHKDWERHHRLCGQNLHGQSPHGQGRPLLPVGRGSSARSADCSVPSPALDKTSATTSRSSTPASVTAIDTNGL

SEQ ID NO: 2289 - DNA, 2195 bp, Rattus norvegicus
  misc_feature (1)..(2195): n=a, c, g or t
  ref <308>: DATABASE ACCESSION NUMBER: EMBL / AB001453
  ref <309>: DATABASE ENTRY DATE: 1998-05-15
ccagggcccgcgctgcgtggctgctgctctgctgccttgtaacggtgaaagggctcgatcgtcggcctcggctgtccctctccgaaaaggctgtcctgggacccgggctcctagtcccgctcggggcaccgcggctcgtgtgctatgcgcggcagtccgcgccggggccggcagcagcagcgcccgggtggatgcggcgagcccacggaggggcatgcttccacgcaccaagtacaaccgcttcaggaatgactcggtgacatcggtcgatgaccttctccacagcctgtcggtgagcggcagcggcggcaaggtctcggcggagcccgcggcgagcccctacctggtgtcgggcgaggcgctgcgcaaggcgccggacgatgggcccggcagcctgggccacctgctccacaaggtgtcccacttgaaactctccagctccggcctgcgtggcctgtcgtcggccgcccgggagcgggcaggagcgcggctctcgggcagctgcagcgcgcccagcctggcggccccggacggtggcagcgcgacccccgggtcccgtgccccggccgccagcatgagcgccaccaggaagagccgggccagcgacgagccgttgcccaggcccccgcggggcgcgccgcacgccagcgaccaggtgctggggtcgggagtcacctatgtggtcaagtacttgggatgcatcgaagttctgcgctcaatgaggtctcttgacttcagtacaagaactcaggttaccagggaagccatcagccgtgtctgcgaagctgtgccaggcgccaaaggagccttcaagaagagaaagcctccgagtaaaatgctgtccagcatcctggggaagagcaacctccagttcgcagggatgagcatctccctgaccatctccaccgccagcctgaacctgcgcactcctgactccaaacagatcatatcgaaccatcacatgcggtccatctccttcgcctcagggggagacccggacacaacagactatgttgcctacgtcgctaaggaccctgtgaatcgcagagcttgccacattctggaatgctgtgacgggctagcccaagatgtcatcggctccatcggacaagcctttgaactccggttcaagcagtatttgcagtgtccttccaagattcctgctctccaggaccgaatgcagagtctggacgagccgtggactgaagaagagggagatggccccgatcacccgtactacaacagcgttcccaacaagatgcctcctccaggagggtttctcgatgctcgattgaaagccagaccccacgcacctgatgcagcccagttttcaggaaaagagcaaacttattaccagggaagacacttaggagatgcattcggtgaagactggcagagagcacccaccaggcaaggctccttggacatctatagcacaccagaagggaaagctcacatggttcctgtaggagaaacaccaacctatgtcaacacccagccagtcccaccacaggtttggccagcagcaaccagcagcactgagagcagcccacggaaggacctctttgacatgaagccttttgaagatgccctcagaaaccaacccctgggccctgtgttgagcaaagctgcgtctgtggagtgtatcagccccgttacacccagagccccggacgccaagatgctggaggagcttaatgctgagccctggtaccaaggcgagatgagcaggaaggaggcagaggctctactacaggaagatggagacttcctagtcaggaagagtaccaccaaccccggctcctttgtcctcacaggcatgcacaatggccaggccaagcacctgctgctggtggacccggaaggcacggtccggacgaaggacagggtctttgacagcatcagtcacctcattacttaccacctggagagcagcctgcccattgtctctgccgggagtgagctttgtctccggcaaccagtggagaggaaaccctgagcttgccctgcgcccaggtcaggaggacctgggctccgctgctctcagcctatggaatctggggcaactgtctgtgggcccatcaccttcttcaaaagccccgtgagagaggtttccttcaagttcaaatttcataaatatgttcacacgactcagatgcatantanaaatgttatacccacacatcctgtacaaa

SEQ ID NO: 2290 - DNA, 466 bp, Rattus norvegicus
  ref <308>: DATABASE ACCESSION NUMBER: EMBL / S50461
  ref <309>: DATABASE ENTRY DATE: 2000-03-04
tggtcaagatcctgctgctgggcgccggcgagagcggcaagtccaccttcctcaagcagatgcgcatcatccacggccgggagttcgaccagaaggcgctgctggagttccgcgacaccatcttcgacaacatccttaagggctcgagggtgcttgtagacgctcgggacaagcttggcattccctggcagcactctgagaacgagaagcacgggatgtttctgatggccttcgagaacaaggcagggctgcctgtggagcctgccaccttccagctctacgttccagccctgagtgcactctggagagactccgggatcagggaacccttcagccgcagaagcgagttccagctgggtgagtcagtgaagtacttcctggataacttagaccggattggccagctgaactacctccccagtaagcaagacatcctgttggctagaaaggccaccaagggaatcgt

SEQ ID NO: 2291 - DNA, 1827 bp, Rattus norvegicus
  ref <308>: DATABASE ACCESSION NUMBER: Refseq / NM_022524
  ref <309>: DATABASE ENTRY DATE: 2003-01-13
atcttggcctcctccagccccttagtgctgcgcagcctgcccggcgggggaagcgccggctcgccatggggagcccgggactccggcccacgctgctgctgcctcaagtactgttgctgttgctggcgctgctgcacgtcccgccgagccagggcttcccaggctctggagactcaccactagaagacgatggagtctggtcttcacactctctctataaagacactccgtggtgctctcccatcaaggtgaaatatggggatgtgtactgcagggctcctcctgggggatattacaaaacagccctggggaccaggtgtgacattcgctgcaggaagggctacgagcttcatggctcttcccagctcgtctgccagtcaaacaggcgctggtcggataaggtcatctgcaaacaaaagcgatgtcctaccctcaccatgccagcaaatggagggtttaagtgtgtcgatggcgcctactttaactctcggtgtgagtactattgctcaccaggatatacattgaaaggggaacggacagtcacatgtatggacaacaaggcctggagtggccgaccagcctcctgtgtagatatggaacctcctagaatcaagtgcccaagtgtgaaagaacggatagctgagcctaataagctgacagtccgcgtgtcctgggaaaccccagagggaagagatacagcagatgggattcttactgatgttattctgagaggtcttcctccaggctcgaattttccagaaggagaccacaagattgagtacactgtctatgacagagccgagaacaagggaacttgcaagttccgagttaaagtaagagtcagacgttgtggcaagctcaatgccccagagaatggttacatgaagtgttccagcgatggtgacaattatggggccacctgtgagttctcctgtatcggtggctatgagcttcagggtagtcctgcccgagtatgccaatccaatctggcttggtctggtacagagcctagctgtgcagcgatgaatgtcaatgttggtgtcagaaccgcagctgcacttttggatcagttttatgagaaaagacgactcctcattgtgtctacacccacagctcgaaacctcctctacagactgcagctgggaatgctacagcaagcacagtgtggtctggatctccgacatatcaccgtggtggagctggtcggagtcttcccaaccctcatcggcaggatcagagcaaagattatgcccccagccctagctctgcagctcaggttgttgcttcgaatcccactctactccttcagcatggttttagtggataagcatggcatggataaagaacgttatgtctccttagtgacacccatggctctcttcaacctcattgacactttccccctgagaaaagaagagatgatccttcaggctgagatgggccagtcttgcaacacctgatgtgctgttccatttcctggtgctttctcacctcttatcatagagtatatcatgtagtatactacagtgcctgtgggaaggccttaaaaatacctttgatgtacagattttcatttgtaatttttaaagtctattttattatgtgcttcctttgctcttaaacattggcacaatgccttttaaactttgaaatgttaaaaaaaaagtacgaatatatctattctaactctccctttaggccattgtggctgatgaaattagaagtgacagccacgcccatgctttcagaatattattcagtgtgaaacacattttccttttctcttattgtttatataagtcttttgttaataaaatattttgaagc

SEQ ID NO: 2292 - protein, 464 aa, Rattus norvegicus
  ref <308>: DATABASE ACCESSION NUMBER: Refseq / NP_071969
  ref <309>: DATABASE ENTRY DATE: 2003-01-13
MGSPGLRPTLLLPQVLLLLLALLHVPPSQGFPGSGDSPLEDDGVWSSHSLYKDTPWCSPIKVKYGDVYCRAPPGGYYKTALGTRCDIRCRKGYELHGSSQLVCQSNRRWSDKVICKQKRCPTLTMPANGGFKCVDGAYFNSRCEYYCSPGYTLKGERTVTCMDNKAWSGRPASCVDMEPPRIKCPSVKERIAEPNKLTVRVSWETPEGRDTADGILTDVILRGLPPGSNFPEGDHKIEYTVYDRAENKGTCKFRVKVRVRRCGKLNAPENGYMKCSSDGDNYGATCEFSCIGGYELQGSPARVCQSNLAWSGTEPSCAAMNVNVGVRTAAALLDQFYEKRRLLIVSTPTARNLLYRLQLGMLQQAQCGLDLRHITVVELVGVFPTLIGRIRAKIMPPALALQLRLLLRIPLYSFSMVLVDKHGMDKERYVSLVTPMALFNLIDTFPLRKEEMILQAEMGQSCNT

SEQ ID NO: 2293 - DNA, 3419 bp, Rattus norvegicus
  ref <308>: DATABASE ACCESSION NUMBER: Refseq / NM_031728
  ref <309>: DATABASE ENTRY DATE: 2003-01-13
ccgggctgcggtgctcctggggcgggaagaggaggcggtagacgcgaccggtgaagatgtcgggccaaacgctcacggatcggatcgctgccgctcagtacagcgtgactggctctgctgtagcaagagccgtctgcaaagccaccactcatgaggtgatgggccccaagaagaagcacctggactatttgatccaggctaccaacgagaccaatgtcaatattcctcagatggcggataccctctttgagcgggcgacaaacagcagctgggtggtggtatttaaagctttagtgaccacacaccacctcatggtgcacggaaatgagagatttattcagtatttggcctctagaaatacgctgttcaacctgagcaactttctagataagagtggatcccacggttatgatatgtccacgttcatacgacgttatagtagatacttgaatgagaaggctttctcctacagacagatggcattcgactttgccagagtgaagaaaggggccgacggtgtaatgaggacaatggttcctgaaaagttgctgaagagcatgccaatcctgcaggggcagatcgacgcactgctggagttcgatgtgcatccaaatgagctaacaaatggtgtcataaatgctgcatttatgcttcttttcaaagatcttatcaaactgtttgcttgctacaatgacggcgtcattaacttacttgaaaaattttttgagatgaagaaaggtcaatgcaaagacgcgctagaaatttacaaacgatttctaactagaatgactcgagtctccgaattcctcaaggtcgcggacgaagttggtattgataaaggtgacattcccgacctcacacaggctcccagcagtcttatggagacccttgaacaacatctaaataccctagaaggaaagaaacctggaaacaatgaaggatctggtgctccctctccattaagtaagtcttctccagccacaactgttacatctcctaattctacaccagctaaaactatcgacacgtccccaccagtcgacatctttgcaacagcatccgcggctgccccagtcagctctgctaagccatcaagcgatctccttgatcttcagccagacttctccggagcacgtgcgggggcagcagcgcctgtaccaccacctactgggggagccactgcgtggggagaccttttgggagaggattccttggctgcactttcctctgttccctctgaagcaccgatttctgacccatttgcaccagaaccttcccctcctactacaaccactgaacctgcttcagcttctgcctcagccaccacagctgtgacagctgccactacagaagtggatctctttggagatgcctttgcagcttctcctggggaggcccctgcagcatccgaaggggccacggcaccagctaccccggccccggtggctgcagctcttgatgcatgctcaggaaatgacccttttgccccatctgaaggtagcgcagaggctgcacctgagctcgacctctttgcaatgaagccacctgagaccagcgctcctgtagttacccctacagctagcacagcccctccagttcccgcaactgctccttctcctgctcccacggctgtggcagccactgctgccaccaccaccgccgccgctgcagctaccaccactgccaccacctctgctgctgctgccaccaccgccgctgctcctcctgctctagatatctttggtgatttgtttgattctgctcctgaagttgctgcggcatctaagccggacgtggctcctagcatagacctgtttggcacagacgctttctcctccccaccacgaggggcctctccggtgcctgagagttctctcactgctgacctcttatccgggtctgggtttcactgtgctgaggatgaccgtcatgttcccctgttcttcactgctgtggacgcgtttgcagcgccgtcgcctgcatccactgcctctcctgcaaaggcggagtcctcgggtgtcatagacctttttggggatgcgtttggaagtagtgcttctgaaacccagccagcaccacaggctgtttctagttcatcagcatcggcagatctactggctggatttgggggttctttcatggccccttctacaacacctgtgactccagctcagaataacctgctgcaacccaattttgaggcagcttttggaacaacgccttcgacttcaagcagcagctccttcgacccatcaggcgatcttctgatgccaaccatggcaccgtccgggcagcctgcccctgtctcaatggtcccacccagtcctgcaatgtcagccagcaaaggccttggaagtgaccttgactcgtctctggccagcttagtaggcaatcttgggatttctggtaccacatcaaaaaagggagatctccagtggaatgctggggagaagaagttgaccggtggagccaactggcaaccaaaagtcactccggccacatggtcagcaggcgttccaccgcaaggcactgttcctccaaccagctcagtccctccgggtgccggcgccccgtctgttgggcaacctggagcaggatatggaatgcctcctgcggggacaggcatgaccatgatgcctcagcagccagtcatgtttgcacagcccatgatgaggccaccctttggagctgcagctgtgcccggcacacagctttctccaagccctacacctgccactcagagtcccaagaaacctccagccaaggacccgttagcggatcttaacatcaaggatttcttgtaaacaatttaagctgcaatttttgtgactgaataggaaaaaactaagctgagtttggaaacgtcagataagattgatgctcagtttcaaagtgagccaccagtaccaaacccagtgtgacgcgtaacttcctctcccaagcacacaggccagctgtggcagtgaacattaggaatgtgtactctttagctgttaccctgctcttccagctcgtagcgtattcgggttctttgtgtgttgtacgaagtaaaccatgagtgaatgaatggttccaatgcctttagtgcttttctggacgttgcccgtggacggaggatgacgcagctgttctgtggtgagccatttggaaagatgtgtctgtgttttcgaaaggtttcgatgtatatataacttttggacaaactcaagtcctcccatgaactttctcttctcttctgtacctctgttacaagcgtaatgtgatactatcagctagtgagacaaacactcttaactatacaaaaactttttcggtgtggagtacatttttccaatcacagaaacttccaacttgttgtgagaaatgtttatttttgtgcactgtatatgttaagaaattttattttaaaaaaaaatgaa

SEQ ID NO: 2294 - protein, 915 aa, Rattus norvegicus
  ref <308>: DATABASE ACCESSION NUMBER: Refseq / NP_113916
  ref <309>: DATABASE ENTRY DATE: 2003-01-13
MSGQTLTDRIAAAQYSVTGSAVARAVCKATTHEVMGPKKKHLDYLIQATNETNVNIPQMADTLFERATNSSWVVVFKALVTTHHLMVHGNERFIQYLASRNTLFNLSNFLDKSGSHGYDMSTFIRRYSRYLNEKAFSYRQMAFDFARVKKGADGVMRTMVPEKLLKSMPILQGQIDALLEFDVHPNELTNGVINAAFMLLFKDLIKLFACYNDGVINLLEKFFEMKKGQCKDALEIYKRFLTRMTRVSEFLKVADEVGIDKGDIPDLTQAPSSLMETLEQHLNTLEGKKPGNNEGSGAPSPLSKSSPATTVTSPNSTPAKTIDTSPPVDIFATASAAAPVSSAKPSSDLLDLQPDFSGARAGAAAPVPPPTGGATAWGDLLGEDSLAALSSVPSEAPISDPFAPEPSPPTTTTEPASASASATTAVTAATTEVDLFGDAFAASPGEAPAASEGATAPATPAPVAAALDACSGNDPFAPSEGSAEAAPELDLFAMKPPETSAPVVTPTASTAPPVPATAPSPAPTAVAATAATTTAAAAATTTATTSAAAATTAAAPPALDIFGDLFDSAPEVAAASKPDVAPSIDLFGTDAFSSPPRGASPVPESSLTADLLSGSGFHCAEDDRHVPLFFTAVDAFAAPSPASTASPAKAESSGVIDLFGDAFGSSASETQPAPQAVSSSSASADLLAGFGGSFMAPSTTPVTPAQNNLLQPNFEAAFGTTPSTSSSSSFDPSGDLLMPTMAPSGQPAPVSMVPPSPAMSASKGLGSDLDSSLASLVGNLGISGTTSKKGDLQWNAGEKKLTGGANWQPKVTPATWSAGVPPQGTVPPTSSVPPGAGAPSVGQPGAGYGMPPAGTGMTMMPQQPVMFAQPMMRPPFGAAAVPGTQLSPSPTPATQSPKKPPAKDPLADLNIKDFL

SEQ ID NO: 2295 - DNA, 4369 bp, Homo sapiens
  ref <308>: DATABASE ACCESSION NUMBER: Refseq / NM_014841
  ref <309>: DATABASE ENTRY DATE: 2002-12-23
gcggcggcgggcgggtactggcttctggggccaggggccaggggcggtgggcgccgggaccgcggagctgaggagcggggcccggccagggctggagactttgcgcccgggggcaccggggctgcgcgcggtcgcacacatccaccggcgcggcttccctcggcggcccgggctccgctcatcctgcggcgggcggcgccgctcaggggcgggaagaggaggcggtagacgcgaccacagaagatgtcgggccaaacgctcacggatcggatcgccgccgctcagtacagcgttacaggctctgctgtagcaagagcggtctgcaaagccactactcatgaagtaatgggccccaagaaaaagcacctggactatttgatccaggctaccaacgagaccaatgttaatattcctcagatggccgacactctctttgagcgggcaacaaacagtagctgggtggttgtgtttaaggctttagtgacaacacatcatctcatggtgcatggaaatgagagatttattcaatatttggcttctagaaatacactattcaatctcagcaattttttggacaaaagtggatcccatggttatgatatgtctaccttcataaggcgctatagtagatatttgaatgaaaaggctttttcttacagacagatggcctttgattttgccagggtgaagaaaggggccgatggtgtaatgaggacaatggctcccgaaaagctgctaaagagtatgccaatactacagggacaaattgatgcactgcttgaatttgatgtgcatccaaatgaactaacaaatggtgtcataaatgcagcatttatgcttcttttcaaagatcttatcaaactttttgcttgctacaatgatggtgttattaacttactcgaaaagttttttgaaatgaagaaaggacaatgtaaagatgctctagaaatttacaaacgatttctaactagaatgacacgagtgtctgaatttctcaaggttgcagagcaagttggtattgataaaggtgacattcctgacctcacacaggctcccagcagtcttatggagacgcttgaacagcatctaaatacattagaaggaaagaaacctggaaacaatgaaggatctggtgctccctctccattaagtaagtcttctccagccacaactgttacgtctcctaattctacaccagctaaaactattgacacatccccaccggttgatttatttgcaactgcatctgcggctgtcccagtcagcacttctaaaccatctagtgatctcctggacctccagccagacttttcctctggaggggcagcagcagccgcagcaccagcaccaccaccacctgctggaggagccactgcatggggagaccttttgggagaggattctttggctgcactttcctctgttccctctgaagcacagatttcagatccatttgcaccagaacctacccctcctactacaactgctgaaattgcaactgcctcagcttctgcctccactactacaactgttactgctgtcactgctgaagtggatctctttggagatgcctttgcagcttctcctggggaggcccctgcagcatccgaaggggccgccgcaccagctaccccaacccctgtagcagcagcacttgatgcatgttcaggaaatgacccctttgccccgtctgaaggtagtgcagaggctgcacctgagctggacctctttgcaatgaagccacctgagaccagtgttcctgtagttacccctacagctagcacagcccctccggttcccgcaactgctccttctcctgctcctgccgttgcagctgctgctgctgccactactgctgccaccgccgctgccaccaccactaccaccacctccgctgccaccgccaccactgctcctcctgctctagatatctttggtgatttatttgagtccactcctgaagttgctgcagcgcctaagccagatgctgctcctagcatagacctgtttagtacagatgctttctcctctccaccacaaggggcctctcctgtgcctgagagttctctcactgctgacctcttatctgtggatgcatttgcagcaccatctcctgcaaccactgcctcgccagcaaaggtggattcttcaggtgtcatagacctttttggggatgcatttggaagtagcgcttctgaaccccaacctgcatctcaggctgcttctagttcatcagcatcggcagacctactagctggatttgggggttctttcatggcgccttccccatctccagtgactccagctcagaataacctgctacagcccaattttgaggcagcttttgggacaacgccttcaacttccagcagcagctcctttgatccatcagtgtttgatggtctaggtgatcttttgatgccaaccatggcaccagctgggcagcctgcacctgtctcaatggtaccacccagtcctgcaatggcagccagcaaagcccttggaagtgatcttgattcatctcttgccagcttagtaggcaatcttggaatttctggtaccacaacaaaaaagggagatcttcagtggaatgctggagagaaaaagttgactggtggagccaactggcagcctaaagtagctccagcaacctggtcagcaggcgttccaccaagtgcacctttgcaaggagctgtacctccaaccagttcagttcctcctgttgccggggccccatcggttggacaacctggagcaggatttggaatgcctcctgctgggacaggcatgcccatgatgcctcagcagccggtcatgtttgcacagcccatgatgaggcccccctttggagctgccgctgtacctggcacgcagctttctccaagccctacacctgccagtcagagtcccaagaaacctccagcaaaggacccattagcggatcttaacatcaaggatttcttgtaaacaatttaagctgcaatatttgtgactgaataggaaaataaatgagtttggagacttcaaataagattgatgctgagtttcaaagggagccaccagtaccaaacccaatacttactcataacttctcttccaaaatgtgtaacacagccgtgaaagtgaacattaggaatatgtactaccttagctgttatccctactcttgaaattgtagtgtatttggattatttgtgtattgtacgatgtaaacaatgaatggatgttactgatgccgttagtgcttttttggacttcacctgaggacagatgatgcagctgttgtgtggcgagctatttggaaagacgtctgtgtttttgaaggtttcaatgtacatataacttttgaacaaaccccaaactcttcccataaattatcttttcttctgtatctctgttacaagcgtagtgtgataataccagataataaggaaaacactcataaatatacaaaactttttcagtgtggagtacatttttccaatcacaggaacttcaactgttgtgagaaatgtttatttttgtggcactgtatatgttaagaaattttattttaaaaaatataaaggttaacgtccataataaatacttctctttgaagctaccttatcaagaacgaaaaatcgtatgggaagaatcccctatttatcactgctatattaaaatatatatattttaattatatttgacaggttttgcatctaaattgacctatttattcattcttgattaaatgcactgaaaagtaaagggtctgtttgtgtcatgttcatgaaaatgcggttagagaggtgctattcaagtgattctgaaggcaccccaaggtatatctgtaatttaaagattactgcaaatatctttactttactgtgggtttttagtacatctgttaatttagtgtttctttgtgtgttttgtagactagtgttcttccatccttcaactgagctcaaagtaggttttgttgtaacattgtgattaggatttaaactaattcagagaattgtatcttttactgtacatactgtattctttaagttttaatttgttgtcatactgtctgtgctgatggcttggcttaagattttgatgcataaatgaggtcactgttgatcagtgttgctagtagcttggcagctcttcataaaagcatattgggttggaaaggtgtttgcctatttttcaaattatttaatagatgtatggtaccatttaaaagtggttgtatctgaatttactgtggggataacatacactgtaatggggaaaaattacctaaaaccaatttcaaaatggctttctttgtatttcagtttaaaaacccagtgcatgtacgccctctgagatgcaataaacaccttgaacaaag

SEQ ID NO: 2296 - protein, 907 aa, Homo sapiens
  ref <308>: DATABASE ACCESSION NUMBER: Refseq / NP_055656
  ref <309>: DATABASE ENTRY DATE: 2002-12-23
MSGQTLTDRIAAAQYSVTGSAVARAVCKATTHEVMGPKKKHLDYLIQATNETNVNIPQMADTLFERATNSSWVVVFKALVTTHHLMVHGNERFIQYLASRNTLFNLSNFLDKSGSHGYDMSTFIRRYSRYLNEKAFSYRQMAFDFARVKKGADGVMRTMAPEKLLKSMPILQGQIDALLEFDVHPNELTNGVINAAFMLLFKDLIKLFACYNDGVINLLEKFFEMKKGQCKDALEIYKRFLTRMTRVSEFLKVAEQVGIDKGDIPDLTQAPSSLMETLEQHLNTLEGKKPGNNEGSGAPSPLSKSSPATTVTSPNSTPAKTIDTSPPVDLFATASAAVPVSTSKPSSDLLDLQPDFSSGGAAAAAAPAPPPPAGGATAWGDLLGEDSLAALSSVPSEAQISDPFAPEPTPPTTTAEIATASASASTTTTVTAVTAEVDLFGDAFAASPGEAPAASEGAAAPATPTPVAAALDACSGNDPFAPSEGSAEAAPELDLFAMKPPETSVPVVTPTASTAPPVPATAPSPAPAVAAAAAATTAATAAATTTTTTSAATATTAPPALDIFGDLFESTPEVAAAPKPDAAPSIDLFSTDAFSSPPQGASPVPESSLTADLLSVDAFAAPSPATTASPAKVDSSGVIDLFGDAFGSSASEPQPASQAASSSSASADLLAGFGGSFMAPSPSPVTPAQNNLLQPNFEAAFGTTPSTSSSSSFDPSVFDGLGDLLMPTMAPAGQPAPVSMVPPSPAMAASKALGSDLDSSLASLVGNLGISGTTTKKGDLQWNAGEKKLTGGANWQPKVAPATWSAGVPPSAPLQGAVPPTSSVPPVAGAPSVGQPGAGFGMPPAGTGMPMMPQQPVMFAQPMMRPPFGAAAVPGTQLSPSPTPASQSPKKPPAKDPLADLNIKDFL

SEQ ID NO: 2297 - DNA, 551 bp, Rattus norvegicus
  misc_feature (1)..(551): n=a, c, g or t
  ref <308>: DATABASE ACCESSION NUMBER: EMBL / AA859508
  ref <309>: DATABASE ENTRY DATE: 2000-03-03
tttttttttttttttttgtaaggaggccctttatttccaaaggaagattttaacagaattggctgagacggtggcttggcacacaacagggaaaagggagtggattccttgagaggttcatagaaggcacccgagaacgagctcgtcaaatcttcctttaaagactaaggttgtagcatgagagggtgtttttggggccaacaagcagattctgcaagccacatggagaagcaacctctgtcttctatggccaaatctcgagtgcacatttttgtgtgacagtcgtgctccggcagccaggctctcattaggatgcagccagcgagatgctcgctagggagaggtgcagggtgtggggcactcggagttacattccatgaaagcattagcctgtgagagattaggaaggtcctgattgtccacagtggggggagaactgaatcgaatgcgcacacatgtcagcgtgaaatagctgctgacaattacggagcgaacatgtgcaatcctttaaaaggtggtactgcatancgggccaaccgccacccctctcg

SEQ ID NO: 2298 - DNA, 609 bp, Rattus norvegicus
  ref <308>: DATABASE ACCESSION NUMBER: EMBL / AA891790
  ref <309>: DATABASE ENTRY DATE: 2000-03-03
agtattgggcagcacttgggaagcaggagcaggaggatctctgtgagttcgaggctagcctgatctacatggagctccaggacagccagggctatgtagagagaccctgtctcaaaaataaaaagaagtattggggatcagatgaccacaggcctttcagagaaccaggagagttgggatttaggagacatttaggacacgtgccagaatcagccagatgagtggcgtatatcctgtcattcagagtgtctggaagctttcaccagccaagcccaaggtcagcatctgtcacttcacggtcacagcccaaacatttctcttcacacataaatgtgatttcagctcagggactgtccagatgggaactttaaagtattctttccttctctattcttagacgtttaatattactgattatttttctcgcctcttaccacatggcaaatggtgctactctaccccatctctgccctaccaaaattgctttttgaatgtcacagcacttgaaaacatgaagtgacctaaatccttttagacccagaagtccttagtccagctcgctggggtatgaaagcaattctgtagcaaataaatccttgcaagagctcc

SEQ ID NO: 2299 - DNA, 585 bp, Rattus norvegicus
  ref <308>: DATABASE ACCESSION NUMBER: Refseq / NM_024349
  ref <309>: DATABASE ENTRY DATE: 2002-11-14
atggaagacaagctgaagaaggccaagatcatcttcgtggtgggcgggcctggctcaggaaaaggtacccagtgtgagaagattgtgcagaaatatggctacacccacctctctactggggacctgcttcgggcagaagtcagctctggatcgtcgaggggcaagatgctgtcatctatcatggagaagggagagctggtgccactggagacggtgctggacatgcttcgggatgctatgtttgccaaagtggactcttccaacggcttcttgattgacggctaccccagggaggttaaacagggagaagagtttgaacggaagatcgcacagcccacactgctactgtatgtggacgcaggccccgagaccatgacccaacgactcctaaagcgaggggagaccagtggccgtgtggacgataacgaggagaccatcaagaagaggctggagacgtattacaaagccacagaacctgtcatctccttctatgacaaacgcggcattgtgcgcaaggtcaatgctgaaggctcagtggacactgtcttctcccaggtttcgacctatcttgactccctgaagtaa

SEQ ID NO: 2300 - protein, 194 aa, Rattus norvegicus
  ref <308>: DATABASE ACCESSION NUMBER: Refseq / NP_077325
  ref <309>: DATABASE ENTRY DATE: 2002-11-14
MEDKLKKAKIIFVVGGPGSGKGTQCEKIVQKYGYTHLSTGDLLRAEVSSGSSRGKMLSSIMEKGELVPLETVLDMLRDAMFAKVDSSNGFLIDGYPREVKQGEEFERKIAQPTLLLYVDAGPETMTQRLLKRGETSGRVDDNEETIKKRLETYYKATEPVISFYDKRGIVRKVNAEGSVDTVFSQVSTYLDSLK

SEQ ID NO: 2301 - DNA, 2271 bp, Homo sapiens
  ref <308>: DATABASE ACCESSION NUMBER: Refseq / NM_000476
  ref <309>: DATABASE ENTRY DATE: 2000-12-01
gcacgcactggccccggcgcccacccgcacccctccccagagagcactgacacggctcccgggacctcggcaggatggaagagaagctgaagaaaaccaagatcatctttgtggtgggtgggcctggctcagggaagggcacccagtgtgagaagatcgtgcagaagtatggctacacccacctctccaccggggacctcctgcggtccgaggtcagctcaggctcggccaggggcaagaagctgtcggaaatcatggagaaggggcagctggttccactggagacagtgttggacatgctccgggatgccatggtggccaaagtcaatacttccaaaggcttcctgattgatggctacccgcgggaggtgcagcaaggagaagagtttgagcgacggattggacagcccacactgctgctgtatgtggacgcaggccctgagaccatgacccagcggctcttgaaacgtggagagaccagcgggcgtgtggacgacaatgaggagaccatcaaaaagcggctggagacctattacaaggccacagaacccgtcatcgccttctatgagaaacgtggcattgtgcgcaaggtcaacgctgagggctccgtggacagtgtcttctcccaggtctgcacccacctggacgccctaaagtagcaacgctggagccgcttccccagctcagagccccgccccaccccgtcctgattagaggtcctcctggcctgagcgcagcgcctccaccctgccctgctgagcacagacggaggaagccgcttatcctgttttcatggacagctgagcactaaaggaatttctaaggacatttggttttactgctttttctctgcttccagttggagttgattcatgtgcttgtgcctacctggccgcaagtccccagcccctcaaccctccgttcctcctcagcctccctttgccagccacccctcctctagctctggtgggaggcccggggcccttcctcgcacagggcatgcctggcctgaggacccggcgctgagtggcggggcccctgctccgaggggctcatgttcaggcagaaccggtcccagcctgggctcctctgcatcttgctctgtgccttggccctgacccccatcgctctgagcatatgttccatgcctgccttgccggggcctggactgcacaggcagcaaggtcatggtctgagtggggcttcctgggcagttggggcggcccacgccagctggcccagtgggtagtgaattggcttccttgacgcgagaggctctgagggtctgaaaagggcatctcaatggcatgggtgggtggggagtcagtcatgtcactgaaattgaatgggggaggcccaatgaggtggctcatgcctgtaatcccagcactttgggaagctgaggcaggaggatcacctgaggtcaggagttcgagagcagcctggccaacatggcaaaaccccttatttactaaaaatacaaaaacttagccgggcatggtggcatgtgcctgtattcccagctactcatgaggctgaggcaggagaatggcgtgaacccgggagtggagcttgcaatgagccaagattgcgccactgcactccagcctgggtgacagagcaagactccgtctcaaaaaaaaaaaaaaaaaaaaagaaattaattgggggagtcatggtcaggggtgagacctgaaggacctccccctgtgtggccctggacacagcccaccctctgtgagccgtttccaattctaaaacagactcaatgtccccctcacccccacctcaaggtcaggatgcgaacacactgagtgaggagtggacgctgtccattgccacggccatgagggctggagaccagaacagcatggcccgaagcgtgcggggccccggatgacttggggacaccccagaatcccctggggagaacccttcctgcgcgctttcattttttgacctcatcactgagaaaggctcaatttggtgctcacgtgtccttaacacctgatctggcccaagctgcgtgccctttaagccaagagagcctcttgtggaccccgcctgcccgaatgaaatccgaacagttggggctgttatggcaagtggggctggtttttcatttccattggttatttaaagtttcctttaaaataaacgattttaagttataaaaggtgaatctattgaaagaagaacatcaaagaaataaacaggagttcagcggagtagcagaagacaaggcatgtagggggagccattctgtcccag

SEQ ID NO: 2302 - protein, 194 aa, Homo sapiens
  ref <308>: DATABASE ACCESSION NUMBER: Refseq / NP_000467
  ref <309>: DATABASE ENTRY DATE: 2000-12-01
MEEKLKKTKIIFVVGGPGSGKGTQCEKIVQKYGYTHLSTGDLLRSEVSSGSARGKKLSEIMEKGQLVPLETVLDMLRDAMVAKVNTSKGFLIDGYPREVQQGEEFERRIGQPTLLLYVDAGPETMTQRLLKRGETSGRVDDNEETIKKRLETYYKATEPVIAFYEKRGIVRKVNAEGSVDSVFSQVCTHLDALK

SEQ ID NO: 2303 - DNA, 476 bp, Rattus norvegicus
  ref <308>: DATABASE ACCESSION NUMBER: EMBL / AA859672
  ref <309>: DATABASE ENTRY DATE: 2000-03-03
tttttttttttttttttgtccccaacaattttattataaatagaaacaagactccctcttggtggctgcagcccctgccttggtggctctgagcacctgttggtgggacctgtccctttagtctggaggccaaaaccaaggaaagggtttgctgtcccaccaagtacatgggggcctgaggtactgaggataaaaagcagagtgggacccagggccgtgctgcccacccaggctgggtgctgccacctgggcccaacagtggcactgctccttcctcagggcaagaggctgccctttttttcacaccacgctctcctccagccgctccgcactgccccccataccccgacacccagctcccagcagccccccatgtacagagtggctccgccgggcccaggctcctcccaggcgcctggcatacccgtagcatccaccggtgtctcctatgtccagggagcagctgcgctggggac

SEQ ID NO: 2304 - DNA, 2963 bp, Rattus norvegicus
  ref <308>: DATABASE ACCESSION NUMBER: Refseq / NM_031736
  ref <309>: DATABASE ENTRY DATE: 2003-01-13
gacacagtactgccgatgttggacagaggatcgcttaacagaacgaaatctcaaaacaaattaacaggacccggttgcttgatttcccaaatcagaaaaggctcgaaatgtctagaggggctgactgatgcagcggtgacccggactggagacagttggacgcgatcatctctggtgcttttgttcaaccttgaaaccttcgccacaggagacttgcctgagcagagaagcaaacgtggagaaacaaagagagatctagcgaaaagcctctgggaccaaggaggggaggtgggactctgggttggcggtggcacctgctgccggctattaataatagggtcgcgatgcgtttataaggtgtttgattaaacaaagactctatgagagaagaataactagcaacagccccacgtctgagtcgtcgcctccgacctttttcaacgtgggttctttgggccgagcgtcgtttgccgagaactagatctcacctgaccccagacgctgaaaacaagcgctgtggcatcctgggccacccaagctgacaagggcgcgccccctgagcacacgaggtgccccacgagggggagggacccacagccgtcccgcccgcaccgcggtgtccgctgcgggcacctgcagccgagccgccacccgcagtcgcagcgcgtccggcggccgaacccggtcgtcagctcgtcagcacctgctctgcttctctcccgcccgccgccgcgctgcacgcctcgagcgctccctcggccccggcggggaccggggaccccgcagccaccgccatgctgcctgtgctctacaccggcctggcggggctgctgctgctgcctctgctgctcacctgctgctgcccctacctcctccaggacgtgcggttcttcctgcaactggccaacatggcccggcaggtgcgcagctaccggcagcggcgacccgtgcgcaccatcctgcatgtcttcttggagcaagcgcgcaagaccccgcacaagcccttcctgctgtttcgcgacgagacgcttacctacgcccaggtagaccggcgcagcaaccaagtagcgcgagcgctgcatgatcacctgggcctgcggcagggggattgcgtggccctcttcatgggcaatgagccggcctacgtgtggctctggctgggactgctcaaactgggctgtcccatggcgtgcctcaactacaacatccgtgccaagtctctgctacactgctttcagtgctgcggggcgaaggtgctgctggcctccccagagctacacgaagctgtcgaggaggttcttccaaccctgaaaaaggagggcgtgtccgtcttctacgtaagcagaacttctaacactaatggcgtggacacagtactggacaaagtagacggggtgtcggcggaccccatcccggagtcgtggaggtctgaagtcacgttcaccacacccgcagtctacatatatacttcgggcaccacaggtcttccaaaggctgcaaccattaatcaccatcgcctctggtatgggaccagccttgccctgaggtccggaattaaggctcatgacgtcatctacaccaccatgcccctgtaccacagcgcggcgctcatgattggcctccacggatgcattgtggttggggctacatttgctttgcggagcaaattttcagccagccagttttgggacgactgcaggaaatacaacgccactgtcattcagtacatcggtgaactgcttcggtacctctgcaacacgccccagaaaccaaatgaccgggaccacaaagtgaaaatagcactaggaaatggcttacgaggagatgtgtggagagagttcatcaagagatttggggacattcacatttatgagttctacgcttccactgaaggcaacattggatttatgaactatccaagaaaaatcggagctgttggaagagaaaattacctacaaaaaaaagttgtaaggcacgagctgatcaagtatgacgtggagaaggatgagcctgtccgtgatgcaaatggatattgcatcaaagtccccaaaggagaggttggactcttgatttgcaaaatcacagagctcacaccattttttggctatgctggaggaaagacccagacagagaagaaaaagctcagagatgtttttaagaaaggagacgtctacttcaacagtggcgatctcctgatgatcgaccgtgaaaatttcatctattttcacgacagagttggagacaccttccggtggaaaggagagaatgtagctaccacggaagtcgctgacattgtgggactggtagattttgttgaagaagtgaatgtttacggtgtgcccgtgccaggtcatgaaggtcgcatcgggatggcctcgatcaagatgaaagaaaactacgagttcaatggaaagaaactctttcagcacatctcggagtacctgcccagttactcgaggcctcggttcctgagaatacaagataccattgagatcaccgggacttttaaacaccgcaaagtgaccctgatggaagagggctttaacccctcagtcatcaaagataccttgtatttcatggatgacacagaaaaaacatacgtgcccatgactgaggacatttataatgccataattgataagactctgaagctctgaatgttgcctggctcctaacacttccagaaagaaacacaataggcctagcatagccccttcacatgtgtaatccaactttaacttgattaaaggttataggtgtgatttttcctaggaaattattcatttaaaggacaattgtttgtttgtttgtttgttttttattaattacaccagaacgtttgcaagtaaaaagatttaaagtcacttatttttcaatgtgcacctgccatttgtccttgcaaacttagcttcttggagagagggccttatttttttaaagacataataaactatgtaaacact

SEQ ID NO: 2305 - protein, 620 aa, Rattus norvegicus
  ref <308>: DATABASE ACCESSION NUMBER: Refseq / NP_113924
  ref <309>: DATABASE ENTRY DATE: 2003-01-13
MLPVLYTGLAGLLLLPLLLTCCCPYLLQDVRFFLQLANMARQVRSYRQRRPVRTILHVFLEQARKTPHKPFLLFRDETLTYAQVDRRSNQVARALHDHLGLRQGDCVALFMGNEPAYVWLWLGLLKLGCPMACLNYNIRAKSLLHCFQCCGAKVLLASPELHEAVEEVLPTLKKEGVSVFYVSRTSNTNGVDTVLDKVDGVSADPIPESWRSEVTFTTPAVYIYTSGTTGLPKAATINHHRLWYGTSLALRSGIKAHDVIYTTMPLYHSAALMIGLHGCIVVGATFALRSKFSASQFWDDCRKYNATVIQYIGELLRYLCNTPQKPNDRDHKVKIALGNGLRGDVWREFIKRFGDIHIYEFYASTEGNIGFMNYPRKIGAVGRENYLQKKVVRHELIKYDVEKDEPVRDANGYCIKVPKGEVGLLICKITELTPFFGYAGGKTQTEKKKLRDVFKKGDVYFNSGDLLMIDRENFIYFHDRVGDTFRWKGENVATTEVADIVGLVDFVEEVNVYGVPVPGHEGRIGMASIKMKENYEFNGKKLFQHISEYLPSYSRPRFLRIQDTIEITGTFKHRKVTLMEEGFNPSVIKDTLYFMDDTEKTYVPMTEDIYNAIIDKTLKL

SEQ ID NO: 2306 - DNA, 2343 bp, Homo sapiens
  ref <308>: DATABASE ACCESSION NUMBER: Refseq / NM_003645
  ref <309>: DATABASE ENTRY DATE: 2003-01-15
atacgactacacctgctccggagcccgcggcggtacctgcagcggaggagctctgtcttccccttcatctcacgcgagcccggcgtcccgccgcgtgcgccccggcgcagcccgccagtccgcccggagcccgcccagtcgccgcgctgcacgcccggggtgaaccctctgccctcgctgggacagagggccccgcagccgtcatgctttccgccatctacacagtcctggcgggactgctgttcctgccgctcctggtgaacctctgctgcccatacttcttccaggacataggctacttcttgaaggtggccgccgtgggccggagggtgcgcagctacgggcagcggcggccggcgcgcaccatcctgcgggcgttcctggagaaagcgcgccagacgccacacaagccttttctgctcttccgcgacgagactctcacctacgcgcaggtggaccggcgcagcaatcaagtggcccgggcgctgcacgaccacctcggcctgcgccagggagactgcgtggcgctccttatgggtaacgagccggcctacgtgtggctgtggctggggctggtgaagctgggctgtgccatggcgtgcctcaattacaacatccgcgcgaagtccctgctgcactgcttccagtgctgcggggcgaaggtgctgctggtgtcgccagaactacaagcagctgtcgaagagatactgccaagccttaaaaaagatgatgtgtccatctattatgtgagcagaacttctaacacagatgggattgactctttcctggacaaagtggatgaagtatcaactgaacctatcccagagtcatggaggtctgaagtcactttttccactcctgccttatacatttatacttctggaaccacaggtcttccaaaagcagccatgatcactcatcagcgcatatggtatggaactggcctcacttttgtaagcggattgaaggcagatgatgtcatctatatcactctgcccttttaccacagtgctgcactactgattggcattcacggatgtattgtggctggtgctactcttgccttgcggactaaattttcagccagccagttttgggatgactgcagaaaatacaacgtcactgtcattcagtatatcggtgaactgcttcggtatttatgcaactcaccacagaaaccaaatgaccgtgatcataaagtgagactggcactgggaaatggcttacgaggagatgtgtggagacaatttgtcaagagatttggggacatatgcatctatgagttctatgctgccactgaaggcaatattggatttatgaattatgcgagaaaagttggtgctgttggaagagtaaactacctacagaaaaaaatcataacttatgacctgattaaatatgatgtggagaaagatgaacctgtccgtgatgaaaatggatattgcgtcagagttcccaaaggtgaagttggacttctggtttgcaaaatcacacaacttacaccatttaatggctatgctggagcaaaggctcagacagagaagaaaaaactgagagatgtctttaagaaaggagacctctatttcaacagtggagatctcttaatggttgaccatgaaaatttcatctatttccacgacagagttggagatacattccggtggaaaggggaaaatgtggccaccactgaagttgctgatacagttggactggttgattttgtccaagaagtaaatgtttatggagtgcatgtgccagatcatgagggtcgcattggcatggcctccatcaaaatgaaagaaaaccatgaatttgatggaaagaaactctttcagcacattgctgattacctacctagttatgcaaggccccggtttctaagaatacaggacaccattgagatcactggaacttttaaacaccgcaaaatgaccctggtggaggagggctttaaccctgctgtcatcaaagatgccttgtatttcttggatgacacagcaaaaatgtatgtgcctatgactgaggacatctataatgccataagtgctaaaaccctgaaactctgaatattcccaggaggataactcaacatttccagaaagaaactgaatggacagccacttgatataatccaactttaatttgattgaagattgtgaggaaattttgtaggaaatttgcatacccgtaaagggagacttttttaaataacagttgagtctttgcaagtaaaaagatttagagattattatttttcagtgtgcacctactgtttgtatttgcaaactgagcttgttggagggaaggcattattttttaaaatacttagtaaattaaatgaac

SEQ ID NO: 2307 - protein, 620 aa, Homo sapiens
  ref <308>: DATABASE ACCESSION NUMBER: Refseq / NP_003636
  ref <309>: DATABASE ENTRY DATE: 2003-01-15
MLSAIYTVLAGLLFLPLLVNLCCPYFFQDIGYFLKVAAVGRRVRSYGQRRPARTILRAFLEKARQTPHKPFLLFRDETLTYAQVDRRSNQVARALHDHLGLRQGDCVALLMGNEPAYVWLWLGLVKLGCAMACLNYNIRAKSLLHCFQCCGAKVLLVSPELQAAVEEILPSLKKDDVSIYYVSRTSNTDGIDSFLDKVDEVSTEPIPESWRSEVTFSTPALYIYTSGTTGLPKAAMITHQRIWYGTGLTFVSGLKADDVIYITLPFYHSAALLIGIHGCIVAGATLALRTKFSASQFWDDCRKYNVTVIQYIGELLRYLCNSPQKPNDRDHKVRLALGNGLRGDVWRQFVKRFGDICIYEFYAATEGNIGFMNYARKVGAVGRVNYLQKKIITYDLIKYDVEKDEPVRDENGYCVRVPKGEVGLLVCKITQLTPFNGYAGAKAQTEKKKLRDVFKKGDLYFNSGDLLMVDHENFIYFHDRVGDTFRWKGENVATTEVADTVGLVDFVQEVNVYGVHVPDHEGRIGMASIKMKENHEFDGKKLFQHIADYLPSYARPRFLRIQDTIEITGTFKHRKMTLVEEGFNPAVIKDALYFLDDTAKMYVPMTEDIYNAISAKTLKL

SEQ ID NO: 2308 - DNA, 2228 bp, Rattus norvegicus
  ref <308>: DATABASE ACCESSION NUMBER: Refseq / NM_053994
  ref <309>: DATABASE ENTRY DATE: 2003-01-13
catgggtgatgagcaggacaggaactgttgccagccaccttcactcctcagctgtgcagtaaccaaaccacacaactgcacatttcaactgcagccccaccttggctggcgcagacacagggcgcaggagtgaagggcgcgagcgcttcttgtgttccagactcttctcctcattcttctgggtgttcatctcgcacgacccattgcctgtaaacagggaccgctttgcctcaggcaggaactgtccgaactctgacagtaggtcctcctgaccacggaagagattggccacctctgtgaagacttcctcctcagacatgccacggaatggacgacccttagtgtgcagctgctccttctggtaggtgtgtaggatctccaggaaggacctgtagatctcagggtggtccagaaagcgggtcttgatcttgttcacatagctgatagcattgttgaactccacagagtcggactccaggggcacctggcctctgtcctccttgtaggacatctgcttgaagtcctccccacagtcaccatggctatgagagttgtcctggttgctcagaggtgactggatgttcaacttgccgttcttgggaatgtctatgcggtatccaagcggaaggaaagcattaaaccccacgatgaggtcagggtgctcatggaagagctgggacacacgcctaatcacgccgggggtgtcaatgctctggcttttgaactccttcatgatctccaggaagccgttgtaggtggcagggtcactgccaaagcggatcttcacctggtcgaggtaggtgagagcatcctccacgtgcactggcagcttctcgtgcaccccagagcccgaacgaccccagcgggagccaccgaatccccggcccgcggagcctccaccgcctgcgtgcgccattttgaaagtcgctgggtggtcgttggaagccgctacggttgtgcctcacgtttctccatgaggaaaatgctggccactgtgctgtctcaagtattttcaggaatggtccagaagccagctctcaggggactgctgtcatctcttaagttctccaacgacgccacctgtgacatcaagaaatgcgacttgtacctgttggaacagggcccccccacctccactgtgctcaccagagaggaggccctgaaatactaccggaacatgcaggtaattcggcgcatggagttgaaggccgaccagctgtataagcagaaattcatccgtggtttctgtcacctgtgtgatgggcaggaagcctgcaatgtggggctggaggcagggataaatcccacagaccacatcatcacgtcctacagagctcatggcttgtgctacacgaggggactgtcagtgaagtccattctcgcagagctgactggacgcaaaggaggctgtgctaaaggcaagggaggctctatgcacatgtacgccaagaacttctatgggggcaatggcattgttggggcacaggtacccctgggagctggtgtggctctcgcctgtaaatacctgaagaatggtcagatctgcttggctttgtatggcgatggtgcggctaaccaagggcaggtatttgaagcttacaatatgtcagccttgtggaaattaccctgtgttttcatctgtgagaataaccgctatggaatgggaacagctattgagagatcagcagccagtactgattaccacaagaaaggctttgttatccctggactgagggtgaatgggatggatattctcagtgttcgtgaggcgaccaagtttgcagctgatcactgcagatccggaaaggggcccattgtgatggagttgcagacataccgttatcatggacacagtatgagcgatccagggatcagttatcgtacacgagaagaagttcagaacgtgaggagtaagagtgatccaataatgcttctccgagagagaatgataagcaacaacctcagcagtgttgaagaattgaaagaaattgatgcagatgtgaagaaagaagtcgaggaagcagctcagtttgctacaactgatccagaaccacctctggaagatttagccaattacctctaccaccaaaatccaccatttgaagtccgtggtgcacataaatggctgaagtttaagtctgtcagttagagatttgttaaattcttcagtgggacatttatggtgaactttaggacatttttcaacattgctaatgaaaaaaaaaaaa

SEQ ID NO: 2309 - protein, 391 aa, Rattus norvegicus
  ref <308>: DATABASE ACCESSION NUMBER: Refseq / NP_446446
  ref <309>: DATABASE ENTRY DATE: 2003-01-13
MRKMLATVLSQVFSGMVQKPALRGLLSSLKFSNDATCDIKKCDLYLLEQGPPTSTVLTREEALKYYRNMQVIRRMELKADQLYKQKFIRGFCHLCDGQEACNVGLEAGINPTDHIITSYRAHGLCYTRGLSVKSILAELTGRKGGCAKGKGGSMHMYAKNFYGGNGIVGAQVPLGAGVALACKYLKNGQICLALYGDGAANQGQVFEAYNMSALWKLPCVFICENNRYGMGTAIERSAASTDYHKKGFVIPGLRVNGMDILSVREATKFAADHCRSGKGPIVMELQTYRYHGHSMSDPGISYRTREEVQNVRSKSDPIMLLRERMISNNLSSVEELKEIDADVKKEVEEAAQFATTDPEPPLEDLANYLYHQNPPFEVRGAHKWLKFKSVS

SEQ ID NO: 2310 - DNA, 608 bp, Rattus norvegicus
  ref <308>: DATABASE ACCESSION NUMBER: EMBL / AI227887
  ref <309>: DATABASE ENTRY DATE: 2000-03-03
gtttgcttcttgtgacatatattggtttgcaaaaagtatctcagaggaccacttaacgaatatctgctcatctgtgccagcattgctgaatctctcctgtgccctggcaagacaactgagtgaagcaagtttattaggatggtttcagggtcattaatgtttctttgtttgctcactgtctttggggtttgactgttttaaacatgaactccagttctgttgagatactgaaagtcagattgcccatttcttctttctaccccttttcagaaaggcctaaagaatgtgtttgatgaagcaatattggctgccttggagcctccagaaccgaagaagagccgcaggtgtgtgctgctatgaacgcatctccagagccctttctgcacagctggtgttgtcatcatactaaaagcaatgtttaaatcaaactaaagattaaaaattaaaattcgtttctgcaataatgacagacgacctgcacctacccacatgcactcatgtgagacaaggcccattagtatggcccccttgcccttccggtaatagttaattttgaataattatgtattgtctaaaaagcgatgagtgctagttttgtttccttgttt

SEQ ID NO: 2311 - DNA, 2880 bp, Homo sapiens
  ref <308>: DATABASE ACCESSION NUMBER: Refseq / NM_032235
  ref <309>: DATABASE ENTRY DATE: 2002-11-04
gtttgccgcgcgagcagccggcctctcgcaggagccgagggacccgcgcggctgcggcccaggagcggcggccgcggagcccggagacccgcagccgcggcggcggcggcggcggcggcagcagctagagcagcgcctcccgccgccgcccgggaggagctcgccgcgcccgctcgccgcctcgtctcccagcggcggcgggaggcgcgtctccccggcccagtccgcgcccggccccgcggggccgctccggcccgctccgaggaaaaactgcatagaaaatctaatggatgaagatgagaaagacagagccaagagagcttctcgaaacaagtctgagaagaagcgtcgggaccagttcaatgttctcatcaaagagctcagttccatgctccctggcaacacgcggaaaatggacaaaaccaccgtgttggaaaaggtcatcggatttttgcagaaacacaatgaagtctcagcgcaaacggaaatctgtgacattcagcaagactggaagccttcattcctcagtaatgaagaattcacccagctgatgttggaggcattagatggcttcattatcgcagtgacaacagacggcagcatcatctatgtctctgacagtatcacgcctctccttgggcatttaccgtcggatgtcatggatcagaatttgttaaatttcctcccagaacaagaacattcagaagtttataaaatcctttcttcccatatgcttgtgacggattccccctccccagaatacttaaaatctgacagcgatttagagttttattgccatcttctcagaggcagcttgaacccaaaggaatttccaacttatgaatacataaaatttgtaggaaattttcgctcttacaacaatgtgcctagcccctcctgtaatggttttgacaacaccctttcaagaccttgccgggtgccactaggaaaggaggtttgcttcattgccaccgttcgtctggcaacaccacaattcttaaaggaaatgtgcatagttgacgaacctttagaggaattcacttcaaggcatagcttggaatggaaatttttatttctggatcacagagcacctccaatcataggatacctgccttttgaagtgctgggaacctcaggctatgactactaccacattgatgacctggagctcctggccaggtgtcaccagcacctgatgcagtttggcaaagggaagtcgtgttgctaccggtttctgaccaaaggtcagcagtggatctggctgcagactcactactacatcacctaccatcagtggaactccaagcccgagttcatcgtgtgcacacactcggtggtcagttacgcagatgtccgggtggaaaggaggcaggagctggctctggaagacccgccatccgaggccctccactcctcagcactaaaggacaagggctcaagcctggaacctcggcagcactttaacacactcgacgtgggtgcctcgggccttaataccagtcattcgccatcggcgtcctcaagaagttcccacaaatcctcgcacacagccatgtcagaacccacctccactcccaccaagctgatggcagaggccagcaccccggctttgccaagatcagccaccctgccccaagagttacctgtccccgggctcagccaggcagccaccatgccggcccctctgccttccccatcgtcctgcgacctcacacagcagctcctgcctcagaccgttctgcagagcacgcccgctcccatggcacagttttcggcacagttcagcatgttccagaccatcaaagaccagctagagcagcggacgcggatcctgcaggccaatatccggtggcaacaggaagagctccacaagatccaggagcagctctgcctggtccaggactccaacgtccagatgttcctgcagcagccagctgtatccctgagcttcagcagcacccagcgacctgaggctcagcagcagctacagcaaaggtcagctgcagtgactcagccccagctcggggcgggcccccaacttccagggcagatctcctctgcccaggtcacaagccagcacctgctcagagaatcaagtgtgatatcaacccagggtccaaagccaatgagaagctcacagctaatgcagagcagcggccgctctggaagcagcctagtgtccccgttcagcagcgccacagctgcgctcccgccaagtctgaatctgaccacacctgcttccacctcccaggatgccagccagtgccagcccagcccagacttcagccatgatcggcagctcaggctgttgctgagccagcccatccagcccatgatgcccgggtcctgtgacgcaaggcagccctcggaagtcagcaggacgggacggcaagtcaagtacgcccagagccagaccgtgtttcaaaatccagacgcacaccccgccaacagcagcagcgccccgatgcccgtcctgctgatggggcaggcggtgctccaccccagcttccctgcctcccaaccatcgcccctgcagcctgcacaggcccggcagcagccaccgcagcactacctgcaggtacaggcaccaacctctttgcacagtgagcagcaggactcgctacttctctccacctactcacaacagccagggaccctgggctacccccaaccacccccagcacagccccagcccctacgtcctccccgaagggtcagcagtctgtctgagtcgtcaggcctccagcagccgccccgataatgccccggcactgaagtcgggacacaatcagctttaaccaatggatgaggggggtggccacaggagatggggagaggagtctgaactaaacccctggcttttgtgcacactgcatacgt

SEQ ID NO: 2312 - protein, 824 aa, Homo sapiens
  ref <308>: DATABASE ACCESSION NUMBER: Refseq / NP_115611
  ref <309>: DATABASE ENTRY DATE: 2002-11-04
MDEDEKDRAKRASRNKSEKKRRDQFNVLIKELSSMLPGNTRKMDKTTVLEKVIGFLQKHNEVSAQTEICDIQQDWKPSFLSNEEFTQLMLEALDGFIIAVTTDGSIIYVSDSITPLLGHLPSDVMDQNLLNFLPEQEHSEVYKILSSHMLVTDSPSPEYLKSDSDLEFYCHLLRGSLNPKEFPTYEYIKFVGNFRSYNNVPSPSCNGFDNTLSRPCRVPLGKEVCFIATVRLATPQFLKEMCIVDEPLEEFTSRHSLEWKFLFLDHRAPPIIGYLPFEVLGTSGYDYYHIDDLELLARCHQHLMQFGKGKSCCYRFLTKGQQWIWLQTHYYITYHQWNSKPEFIVCTHSVVSYADVRVERRQELALEDPPSEALHSSALKDKGSSLEPRQHFNTLDVGASGLNTSHSPSASSRSSHKSSHTAMSEPTSTPTKLMAEASTPALPRSATLPQELPVPGLSQAATMPAPLPSPSSCDLTQQLLPQTVLQSTPAPMAQFSAQFSMFQTIKDQLEQRTRILQANIRWQQEELHKIQEQLCLVQDSNVQMFLQQPAVSLSFSSTQRPEAQQQLQQRSAAVTQPQLGAGPQLPGQISSAQVTSQHLLRESSVISTQGPKPMRSSQLMQSSGRSGSSLVSPFSSATAALPPSLNLTTPASTSQDASQCQPSPDFSHDRQLRLLLSQPIQPMMPGSCDARQPSEVSRTGRQVKYAQSQTVFQNPDAHPANSSSAPMPVLLMGQAVLHPSFPASQPSPLQPAQARQQPPQHYLQVQAPTSLHSEQQDSLLLSTYSQQPGTLGYPQPPPAQPQPLRPPRRVSSLSESSGLQQPPR

SEQ ID NO: 2313 - DNA, 487 bp, Rattus norvegicus; identical to SEQ ID NO: 1135
  ref <308>: DATABASE ACCESSION NUMBER: EMBL / AA874889
  ref <309>: DATABASE ENTRY DATE: 2000-03-03

SEQ ID NO: 2314 - DNA, 574 bp, Rattus norvegicus
  ref <308>: DATABASE ACCESSION NUMBER: EMBL / AA799686
  ref <309>: DATABASE ENTRY DATE: 2000-03-03
catcatcacacacttttattgggtgcccacagaattcaggcacgttcatgtttacagagctttgctgatacgctgaccttgcccttaaggagcttacaatctaccaggagaaagacaagaaacgtaggtgtgaaagcaatgagtgaacagacactacagactgaaaaaccaccataaacataaaacacatattgcaaaatgagttaatggggatggcaaggatctgagatagcctttgctatattcctgacttcctgaaggtcacaggtttaaactatttgagggacaagagtggagttgagaaaagccacgatacaaatgagataagttctcccttactccctgctcccgggggtcacaaggactacagggatagtgataagacaaaggttgcagtgctcttagcacctctagccacagtggatttggaccagaacaaagctactagttagatgacaatcctggactggttcaaaggaggatcaaagttttttctgcaccagctctatcacacacataatggctcaggtcaaatgtttaagatggccagaggtgccactgtgttaaggagcag

SEQ ID NO: 2315 - DNA, 1136 bp, Homo sapiens
  ref <308>: DATABASE ACCESSION NUMBER: EMBL / AF038199
  ref <309>: DATABASE ENTRY DATE: 1998-01-23
ggggtttcaccacgttggccaggctggtctcgaactcctgacctcagatgatccaccctccttggcctcccaaagtgctgggattgcaggcgtgagccaccgcctggccaccattttactctttttaggtacagtaatctaatatccaaagtcttggactcagctaaagagggtatttaccttaaaaaaaaaaaaaaaaagactccatcttttgattcataattgtggtgggggcggggaatcaagacaaccttagtcactttggtattaccataattcttgtcttttcagggttgtcctgttcagctgcataaaacatcatgtattctaggtatttcctaccttcacttacatttttacttgccgatgtgctgccttcataaatgggtatattccgccacacatctagtaagcccccaatgcagtacacaatgtgtatcactgataaaactcgcacttctgccatgtcagtattatattcagttgagtggtctttagcatagtggcagtcctagtcatcctaaccttttagttaaggtaaaattacatatgtttatagaactcatatagacaagctagtttttaaaatcttcttccttttaaccagtttaggatgatctaagatagctaagttacctacatggtgactgttcggtctaattcagaaacagaagtactaaaagaatactaaaaagtttttacccattatctctatccctgttttctttttgcaattctcagctgcagggagcaagaaaatacacagcagataggaaatgtttgtttgcatcctggctttctcaactgcactttacgtccttgaatattctagatatttactccttcaagaagtcaggagtatatccaggcctacctatcatccttgccatccccattaaccctcatttttcagtatgtgttttacatttatggttatttttcagtctatagtatctgttcactcattgctctatcacatctgagtttctccgtctttctttccactagattgtaagctccttaagggcaaggtcggcatataagcaaagttctgtaaacaccgtgaaggtaccatgagttctatgggtactcaataaatgcttgtgataatgaaaaaaaaaaaaaaaaaaaaaaaa

SEQ ID NO: 2316 - DNA, 6471 bp, Rattus norvegicus
  ref <308>: DATABASE ACCESSION NUMBER: Refseq / NM_013111
  ref <309>: DATABASE ENTRY DATE: 2003-01-14
gacgacttggccgccaggcaccgatcctccccggtgagaaggtccacgaatcttactgcagacagatttgctcagcgcgatgggctgcaaaaacctgttgagcctgggtcagcagatgctgcgccggaaagtggtggactgcagccgggaggagagccggctgtcccgctgcctcaacacctatgatctggtagctcttggggtgggcagcaccttgggcgctggtgtctacgtcctagccggtgcagtggcccgtgagaatgctggtcctgccatcgtcatctccttcctgatcgctgctcttgcctcagtgctggccggcctgtgctatggcgagtttggtgcccgtgtccccaagacgggctcagcctacctctacagctatgtgacagtgggggagctctgggccttcatcactggctggaacctgattctctcctacatcatcggtacatccagcgtggcaagagcctggagtgcaacttttgacgagctgataggcaaacccatcggagagttctcgcgtcaacacatggccctgaacgcccctggggtgctggcccaaaccccggatatatttgctgtgattataattatcatcctgacaggactgttaactctcggtgtgaaagaatcagccatggtcaacaaaatcttcacctgtatcaatgtcctggtcttgtgcttcatcatggtgtcgggattcgtgaaaggctccattgagaactggcagctcacggagaataaatccagtcctctctgtgggaacaatgacacaaacgtgaaatacggtgagggagggttcatgccctttggattctctggtgtcctgtcaggggcagcgacctgcttttatgccttcgtgggctttgactgcatcgccaccacaggggaagaagtcaagaacccccagaaggccattcctgtgggcattgtggcgtccctcctcatttgcttcatagcttactttggggtgtccgctgctctcaccctcatgatgccctacttctgcctggacactgacagcccactgcctggcgccttcaagtacaggggctgggaagaagctaagtatgcagtggccgtgggctccctctgcgcactctccaccagtctcctaggttccatgttccccatgccccgagttatctatgccatggctgaagatggactactgtttaaatttttggccaaaatcaacgataggaccaaaacaccaataatcgctactgtgacctcaggcgccatcgctgctgtgatggccttcctctttgaactgaaggacctggtggacctcatgtccattggcactctcctggcttactctttggtggctgcctgtgttttggtcttacggtaccagccagaacaacctaatctggtataccagatggccagaaccaccgatgagctagaccaggtagaccagaacgagatggtcagtgccagtgagtcccagacaggctttttaccagcagccgagaagttttctctgaaaaccatactctcacccaagaacatggagccgtccaaattctcagggctaattgtgaacatttcagccggcctcctagccgttcttatcatcaccgtgtgcattgtggccgtgcttggaagagaggccctggctgaagggacgctgtgggcagtctttgtaatgacaggatcagtcctcctctgcatgctggtgacaggcatcatctggaggcagcctgagagcaagaccaagctctcatttaaggtaccctttgtccccgtacttcctgtcttaagcatctttgtgaacatctatctcatgatgcaactggaccagggcacgtgggtccggttcgcagtgtggatgctgataggctttgccatctactttggctatggggtctggcacagtgaggaagcatccctggctgctggccaggcaaagactcctgatagcaacttggaccagtgcaaatgacccacagccccacccaccaaggtgacagcggttgacgggtgcgcagaggcctgggaccctcacactctctcccctcatgcctcgggaccagctcacacccccaatgtcaccaaagctggtttgtagcctcagccatagctgacatggcctggtcagacaaccctgcagccagctccagagatcctggtcacttctggacagttccttggtttttctcatctccctctgaacaaagaaagcagcccttctccctgccagctgggcgctttgctgcttcggccccagcagaagggaggcccccttctcctcttattcgggaagcaggcctccctccctccctgggaccaccctgcgtacactcatacgtacactccagagggttagtgggcgtctatctccctgtcaacccagccaggacagccacctgaccccaagatgcgagactagcccagtgaggaagctgtctcccagcagtgcaacccaacagcccatcaactccagaatacctagaggaccaacaggcccgcatcttactgctttcaggctggggtattaggatggggccctgatctgcatagaggcttctggaccaagcccagcacagtatagccgttcttacgcgcagaaaacgggaggtccctggagtgatcgattgtatcaagactggatgccagctctgctcacgtggacgagggcgacattctctagccttattcttagcaggcctggatcagtttctgctgctcttggcatctgtcctcactgtcctgagtcactggaacacgaggctatatcagtaggattgtcattctctcaggtcttccaaggtgcttcggacaggtggcactcaattcagggtggtgacactcttctaacgtgacgcgaaggactgctgtgggggtcctccagtcgcttgctgtgaatcactccactggattaacttggggttcactgttgttaatgttccaaccttgggagatggtcaaataattacccagtgccatatcagcttgtggttcgtgatgtgcgctctgcacaagaggtggcttggggtcctaccgctatccctcctgtagctgtggtgcctttgcctgccgtgctactggtaagatttctaccctggcctggaccttctgctccccgagtctgccttcatttcccctcccccatgctccttatctctctgggtgaggccctaggcacacctcttcacttactctgtgtagatagaaaggatggtgagtgagtgctggtggattctggaaccagcagggcacccctcctccactcccaacgccatgacatcagggtgggaaggctggtgtcttagactaatattaatgctgtttttaaagcctagctttctttcctgtctggcctttgacccatgtctggtagaaaccggccgggtaaactgatgacactgtcttcccctctgctccggaaggttcttgggaatggccggagttggtggaactggcctggcacggaacctagtggtggagcacttgcctagcatatgcagggccccagtgctacggaaaattagagaaaccgcccggttgctgtgtcagccagtggagggtagcagagcagccaagagccaggcatcgtgccaggccctgacccccatccaggcactttgtctcctaggttgtctgagaaaacttcaaagggagtattataagaccctaaatgttgagtttctaaaggtatttaaagttatgtagattggtgctgtaaaatattttgataaatattaacttatttcattcgggtcttaattacctgttgtcttcttagggcctgttagatatgtctgggttggtttttttcccccccttgttacttacataggcagagaaggagtgcccagtgaggtgttgggagaattaggtttcactctgtagctgccctagtctagcctctgcctcaggctcctgagtgctaaggtcgtaggtgtgagcctcctctcctcctgctaaactgtctcctcgctttctggatgaaactttcctgtctaaggcagctgaacaatgtgtttacagttgacatttcagccagcagcctggatcccaccaaggggaaaggtgtatatatatatatatatatatatgggtttgatccgccgacagcaatggtggcagatctgctctgtgtgtttcactatgtgacacaggagcaaacacaggccttgctgggggtgggggttggaggggtgacatcctatacccacttcctagtcaggaaaagatatgcaggggtgacttgcctagttagttgattggccactgagcttttactaagtgtggacagttaaccagggaagctcttttggggtgcacgggaacaatgaagcttggagggagtccctaatatgctttttattatgcccccagttccttttcctgaaagaaaacacaagccccaaacccagacaacacacatacacacatccctccggacccacagtaggtagggtcgagtctcctagtctcccgtccaaaaaagagtcccattggattcaaagcgtggccagtatttcctacctggttgggacttaaacattttaaagacaacttcccatgccttcccttcaactagagtgctcacattggaaagacccattttctcaggagcctgtgcccttccttcttgtctctgggtcgaagttcatgaagaagccaatacccagggagctgtgcttaggagtggggcccaagatgtctccacctttcagaaggtgccccagtggtggcttggtggcagaagtgactgcaggaccgtggcaggacatcaggctcctccacctgcccctagtggcaagggttggatatccccctccaaaccccctcctgagcacagcagcgtgtgcacaccaaaggaatatatgacacactccaaccctgtccactacctgccactctcatgcacagggctggggataccagtggctatgtttgtacgttggccctaaccccaggcagacattctgaattgggtagtgttcatagtctcctctaacaaggaacttgcccaacgctggaagaagcttagaaacagcagtgtgagggactgggttcctcccataagcgtggacaagtcccacagaccccctcatatctaccggccaagccacgggcaccgctggcctgtgtacctacctacaatgaaaacatggctggctctcgccggggcccatcctttctgacttgaatgtcgtatgtccccacagaaacttatttcattctaataaaagcttaagcttactgttttcttggtacccaaacactaaggaatcttagtagggatctcagtgccaggatacttgagtccaggtatggttgaggtagccaagtgagtggccaacagagaatacatgagccatggaactgctacagaagtcaaagtcagcggtgaatgtatgttatgtgcggttattttatggagttcaaaccgtcctgtctgtttggcctcctcgtgagaagattgtacgtgaggctcctggggggagagtgaacggtccattccttcagctcattttggtgtgtggaatgcttttattgacacagtggtacaggtgaaatgtgcaccagtccaatgtggttaggatgaaaattttaaggcaaaaagaaaaaaaaatcagctggttttcacctcccttactctagcccagtctggccgtatccgctgctccattgaactggaagaatatggtgtggccaagggtcttgggacatggtgaccaaggagccttcctggaccatcctgttacatgtgctgaatggctagcaaaaaaagcccaggagagatgaaaagaccacgtccaaaaaatgttctcagggcgctggcgtgtccagcagggtcaggaagcaagatttaggaagagacatcatgcaaactaatttattgacaagtgttacctttgcgttccttgacaagctttgcgttggactatttcccattggaaagttataatatatcttgtattaaggtattactgcttgttgtgcctgcagcttcgatgggttaaggtcacagagggtcatgatactaatgagggctggtttattagcaaacctgagcagtaaagtgctttctccagcacaatttttttacttctactgaacacggagccattattaaaagagttatgtgtggattttcattatgtaaattgtatatatttttttgcttgttcgaggttctatttttctaatagtcttcttacagtttcttacaatgacattagattaagtccgatactaactgtaaatcaagctggtctctgttggattcccgtggattaattctatttattttaaggccaagtgcaggtgtcgtccatcacccttttaagaaatgtgaaacttgtgtctcccctcgtggctgaatacattgtacactggcaaaccccctcccgtccctgtgtgtcagagctattttgtggtacattgtgtcatgcttctgcagatgctaataaatcctgtctggcttccaaaaaaaaaaaaaaaaaa

SEQ ID NO: 2317 - protein, 624 aa, Rattus norvegicus
  ref <308>: DATABASE ACCESSION NUMBER: Refseq / NP_037243
  ref <309>: DATABASE ENTRY DATE: 2003-01-14
MGCKNLLSLGQQMLRRKVVDCSREESRLSRCLNTYDLVALGVGSTLGAGVYVLAGAVARENAGPAIVISFLIAALASVLAGLCYGEFGARVPKTGSAYLYSYVTVGELWAFITGWNLILSYIIGTSSVARAWSATFDELIGKPIGEFSRQHMALNAPGVLAQTPDIFAVIIIIILTGLLTLGVKESAMVNKIFTCINVLVLCFIMVSGFVKGSIENWQLTENKSSPLCGNNDTNVKYGEGGFMPFGFSGVLSGAATCFYAFVGFDCIATTGEEVKNPQKAIPVGIVASLLICFIAYFGVSAALTLMMPYFCLDTDSPLPGAFKYRGWEEAKYAVAVGSLCALSTSLLGSMFPMPRVIYAMAEDGLLFKFLAKINDRTKTPIIATVTSGAIAAVMAFLFELKDLVDLMSIGTLLAYSLVAACVLVLRYQPEQPNLVYQMARTTDELDQVDQNEMVSASESQTGFLPAAEKFSLKTILSPKNMEPSKFSGLIVNISAGLLAVLIITVCIVAVLGREALAEGTLWAVFVMTGSVLLCMLVTGIIWRQPESKTKLSFKVPFVPVLPVLSIFVNIYLMMQLDQGTWVRFAVWMLIGFAIYFGYGVWHSEEASLAAGQAKTPDSNLDQCK

SEQ ID NO: 2318 - DNA, 2157 bp, Homo sapiens
  ref <308>: DATABASE ACCESSION NUMBER: Refseq / NM_003045
  ref <309>: DATABASE ENTRY DATE: 2000-10-31
cgatcctgccggagccccgccgccgccggcttggattctgaaaccttccttgtatccctcctgagacatctttgctgcaagatcgaggctgtcctctggtgagaaggtggtgaggcttcccgtcatattccagctctgaacagcaacatggggtgcaaagtcctgctcaacattgggcagcagatgctgcggcggaaggtggtggactgtagccgggaggagacgcggctgtctcgctgcctgaacacttttgatctggtggccctcggggtgggcagcacactgggtgctggtgtctacgtcctggctggagctgtggcccgtgagaatgcaggccctgccattgtcatctccttcctgatcgctgcgctggcctcagtgctggctggcctgtgctatggcgagtttggtgctcgggtccccaagacgggctcagcttacctctacagctatgtcaccgttggagagctctgggccttcatcaccggctggaacttaatcctctcctacatcatcggtacttcaagcgtagcgagggcctggagcgccaccttcgacgagctgataggcagacccatcggggagttctcacggacacacatgactctgaacgcccccggcgtgctggctgaaaaccccgacatattcgcagtgatcataattctcatcttgacaggacttttaactcttggtgtgaaagagtcggccatggtcaacaaaatattcacttgtattaacgtcctggtcctgggcttcataatggtgtcaggatttgtgaaaggatcggttaaaaactggcagctcacggaggaggattttgggaacacatcaggccgtctctgtttgaacaatgacacaaaagaagggaagcccggtgttggtggattcatgcccttcgggttctctggtgtcctgtcgggggcagcgacttgcttctatgccttcgtgggctttgactgcatcgccaccacaggtgaagaggtgaagaacccacagaaggccatccccgtggggatcgtggcgtccctcttgatctgcttcatcgcctactttggggtgtcggctgccctcacgctcatgatgccctacttctgcctggacaataacagccccctgcccgacgcctttaagcacgtgggctgggaaggtgccaagtacgcagtggccgtgggctccctctgcgctctttccgccagtcttctaggttccatgtttcccatgcctcgggttatctatgccatggctgaggatggactgctatttaaattcttagccaacgtcaatgataggaccaaaacaccaataatcgccacattagcctcgggtgccgttgctgctgtgatggccttcctctttgacctgaaggacttggtggacctcatgtccattggcactctcctggcttactcgttggtggctgcctgtgtgttggtcttacggtaccagccagagcagcctaacctggtataccagatggccagtacttccgacgagttagatccagcagaccaaaatgaattggcaagcaccaatgattcccagctggggtttttaccagaggcagagatgttctctttgaaaaccatactctcacccaaaaacatggagccttccaaaatctctgggctaattgtgaacatttcaaccagccttatagctgttctcatcatcaccttctgcattgtgaccgtgcttggaagggaggctctcaccaaaggggcgctgtgggcagtctttctgctcgcagggtctgccctcctctgtgccgtggtcacgggcgtcatctggaggcagcccgagagcaagaccaagctctcatttaaggttcccttcctgccagtgctccccatcctgagcatcttcgtgaacgtctatctcatgatgcagctggaccagggcacctgggtccggtttgctgtgtggatgctgataggcttcatcatctactttggctatggcctgtggcacagcgaggaggcgtccctggatgccgaccaagcaaggactcctgacggcaacttggaccagtgcaagtgacgcacagccccgccccccggaggtggcagcagccccgagggacgcccccagaggaccgggaggcaccccaccctccccaccagtgcaacagaaaccacctgcgtccacaccctcactgca

SEQ ID NO: 2319 - protein, 629 aa, Homo sapiens
  ref <308>: DATABASE ACCESSION NUMBER: Refseq / NP_003036
  ref <309>: DATABASE ENTRY DATE: 2000-10-31
MGCKVLLNIGQQMLRRKVVDCSREETRLSRCLNTFDLVALGVGSTLGAGVYVLAGAVARENAGPAIVISFLIAALASVLAGLCYGEFGARVPKTGSAYLYSYVTVGELWAFITGWNLILSYIIGTSSVARAWSATFDELIGRPIGEFSRTHMTLNAPGVLAENPDIFAVIIILILTGLLTLGVKESAMVNKIFTCINVLVLGFIMVSGFVKGSVKNWQLTEEDFGNTSGRLCLNNDTKEGKPGVGGFMPFGFSGVLSGAATCFYAFVGFDCIATTGEEVKNPQKAIPVGIVASLLICFIAYFGVSAALTLMMPYFCLDNNSPLPDAFKHVGWEGAKYAVAVGSLCALSASLLGSMFPMPRVIYAMAEDGLLFKFLANVNDRTKTPIIATLASGAVAAVMAFLFDLKDLVDLMSIGTLLAYSLVAACVLVLRYQPEQPNLVYQMASTSDELDPADQNELASTNDSQLGFLPEAEMFSLKTILSPKNMEPSKISGLIVNISTSLIAVLIITFCIVTVLGREALTKGALWAVFLLAGSALLCAVVTGVIWRQPESKTKLSFKVPFLPVLPILSIFVNVYLMMQLDQGTWVRFAVWMLIGFIIYFGYGLWHSEEASLDADQARTPDGNLDQCK

SEQ ID NO: 2320 - DNA, 4171 bp, Rattus norvegicus; identical to SEQ ID NO: 1963
  ref <308>: DATABASE ACCESSION NUMBER: EMBL / AB005540
  ref <309>: DATABASE ENTRY DATE: 1998-12-29

SEQ ID NO: 2321 - protein, 524 aa, Rattus norvegicus; identical to SEQ ID NO: 1964
  misc_feature (1)..(524): Xaa=Unknown amino acid

SEQ ID NO: 2322 - DNA, 8553 bp, Rattus norvegicus
  ref <308>: DATABASE ACCESSION NUMBER: Refseq / NM_012647
  ref <309>: DATABASE ENTRY DATE: 2002-11-05
accccctgtctttgcttttcctctttagtaaggatattattgcacatgtgagatttttacttcctactgtaggctgaattctagaaacctgcactggagactgctacattcaacacgcacatggattctgtgctatgattaccattccttttatttcagcactttcttacgcgaggagctaaacagtgactaaagaagcaggatgaaaagatggcacggtcagtgctggtacctccaggacctgacagcttccgcttctttaccagggaatcccttgctgctatcgaacagcgcattgcagaagagaaagctaagagacccaaacaggaacgcaaggacgaagacgatgaaaatggcccaaagccaaatagtgacttggaagcaggaaaatcccttccttttatttatggagacattcctccagagatggtgtcagaaccactggaggacctggacccctactatatcaataagaaaacctttatagtattgaataaggggaaagcaatctcgcggttcagcgccacctctgccctgtacattttaactcccttcaaccccattagaaaattagctattaagattttggtacattctttattcaatgtgcttatcatgtgcacaattcttaccaactgtgtgtttatgaccatgagtaaccctccagactggacaaagaatgtggagtatacttttacaggaatttatacttttgaatcacttattaaaatccttgcaaggggcttttgtctagaagatttcacatttctacggaatccctggaattggttggatttcacagtcattacttttgcgtatgtaacagaatttgtaaacctaggcaatgtttcagctcttcgaactttcagagtcttgagagctttgaaaactatttctgtaattccaggcctgaagactatcgtgggggccctgatccagtcagtgaagaagctctctgacgtcatgatcctcaccgtgttctgtctcagtgtctttgctctaatcgggctgcagctcttcatgggcaacctgaggaataaatgcttgcagtggcccccagacaattctacctttgaaataaatatcacttccttctttaataactcattggattggaatggtactgccttcaataggacggtgaacatgtttaactgggacgaatatattgaagataaaagtcacttttattttttggaaggacaaaacgatgctctgctttgtgggaacagctcggatgctggacagtgtccagaaggatacatctgtgtgaaggctgggagaaaccccaactacggctacacaagttttgacaccttcagctgggccttcttgtccttatttcgtctcatgactcaagacttctgggaaaacctttatcagctgaccttgcgtgctgccgggaaaacatacatgatattttttgtgctggtcattttcttgggctcattctacctgataaatttgatcctggctgtggtggccatggcctacgaggaacagaaccaggccacactggaggaggctgaacagaaggaggcagagtttcagcagatgctggagcaactgaagaagcagcaggaggaagctcaggcagcagctgcagcagcgtccgcagaatccagagacttcagcggggcaggcgggataggtgttttctcggagagttcgtcagtagcctcaaagttaagttccaaaagtgaaaaggagttgaaaaacagaagaaagaaaaagaaacagaaagaacaggctggggaggaagagaaggaagacgcggtgcggaaatctgcctctgaggacagcatacgaaagaaaggcttccagttttccctggaaggaagtagattgacctacgagaagagattttcctctccgcaccagtctctcttgagcatccgaggctccctattttctccaagacgcaacagtagagcaagccttttcaacttcaaaggtcgagtgaaggatattggttccgaaaatgactttgcagacgatgaacacagcacatttgaggacaacgacagcagaagagactctctatttgtaccacacagacatggagaaaggcgtcctagcaatgtcagccaggccagccgtgcctcccgggggatacccactctacccatgaatgggaagatgcacagtgcagtggactgcaacggtgtggtgtccctggttggaggcccctctgcgctcacatcgcctgtggggcagctgctgccggagggcacaactactgagacagaaataaggaagaggagatccagttcttaccacgtctctatggacttgttggaagacccttcaaggcaaagggcaatgagtatggccagtattttgacgaacactatggaagaacttgaagaatccagacagaaatgcccaccctgctggtataaatttgctaatatgtgcctgatttgggactgttgtaagccatggctaaaggtaaaacacgttgtcaatctggtagtgatggatccatttgttgacctggccatcaccatctgcattgtgttaaatacgctcttcatggccatggagcactaccccatgactgagcagttcagcagtgtgctgtctgttgggaatttggtcttcactgggatcttcacggcagaaatgtttctcaagataatagccatggatccatattattacttccaagaaggctggaatatctttgatggctttatagtgagccttagtttaatggaactcggcttggcgaatgtggaaggattgtcagttctccgatcattccggctgcttagagtcttcaagttggcaaagtcctggcccacactgaacatgctcattaagatcatcggcaactcggtgggtgcactgggcaacctgaccctggtgctggccatcatcgtcttcatttttgccgtggtcggcatgcagctgtttggaaagagctacaaggagtgtgtctgtaagatttccaatgattgtgagctcccgcgctggcacatgcaccacttcttccactccttcctgatcgtgtttcgagtcctgtgtggggagtggatagagaccatgtgggactgcatggaggtcgcgggccagaccatgtgccttactgtcttcatgatggtcatggtgattgggaaccttgttgtcctgaacctcttcttggccttgctcctcagttctttcagctcagacaacctggctgccacagatgacgataacgaaatgaacaacctccagatagccgtgggaaggatgcagaagggaattgattttgttaaaaggaagatacgtgaattcattcagaaagcctttgtcagaaagcagaaagctttagatgaaatcaaaccgctggaagatctgaataacaagaaagacagttgtatctccaaccacacgaccatagaaataggcaaggacctcaattacctcaaagatggaaacgggacgaccagtggcataggcagcagtgtggagaagtatgtggtagatgagagtgattacatgtcgttcataaacaaccccagcctcaccgtgactgtgcccatcgcccttggagagtctgactttgaaaacttaaacacggaagaattcagtagtgagtcagatatggaagaaagcaaggagaaattgaatgcaactagctcatctgagggcagtacggttgatataggcgctccggcagagggagagcagccagaggccgaaccggaagaatcgcttgaaccggaagcgtgtttcacagaagactgtgtgagaaagttcaagtgttgtcagataagcatagaagagggcaaaggcaagctctggtggaacttgaggaaaacgtgctacaagatagtagagcataactggtttgaaaccttcatcgtttttatgattctgctcagcagtggtgctctggcctttgaagacatttatattgagcagcgaaagaccatcaagaccatgctggagtatgctgacaaggttttcacttatatcttcatcctggagatgcttctaaagtgggtggcctatggtttccaaatgtatttcaccaatgcctggtgctggctggacttcctgatcgttgatgtctccttggttagcttaactgcaaatgccttgggctattcggaacttggtgccatcaagtccctccgaacgttaagagctctgagacctctacgagccttatcccgatttgaaggaatgagggttgttgtaaacgctctcttaggcgccatcccctccataatgaacgtacttctggtctgcctgatcttttggctaatattcagtatcatgggggtgaatctctttgctggcaagttctaccattgcatcaactacaccacgggggaaatgtttgatgtgagcgtggtcaacaactacagtgaatgccaagctctcattgagagcaatcagacggccaggtggaagaacgtgaaggtcaacttcgataacgtgggactcggatacctttctctgctccaagtagccacctttaaaggatggatggatatcatgtatgcagctgttgactcaagaaatgtagaactgcagcccaaatacgaagacaatctctacatgtacctttactttgtcatcttcatcatcttcggctcattcttcaccctgaacctgttcattggtgtcatcatagacaacttcaaccagcagaagaagaagtttggaggtcaagacatctttatgacagaagaacagaagaaatactacaatgcaatgaagaagctcggctccaagaaaccgcagaagcccattcctcggcctgcaaacaaatttcaagggatggtctttgattttgtaaccaaacaagtctttgacatcagcatcatgatcctcatctgcctcaacatggtgaccatgatggtggaaacggacgaccagagtcaggagatgaccaacatcctgtactggatcaacctggtgttcattgtcctgttcacgggcgagtgtgtgctgaagctcatctccctccgccattattatttcaccatcggctggaatatttttgattttgtggtagtcatcctctccattgtaggaatgtttctcgcggagctgatagagaagtatttcgtgtcccctaccctgttccgagtcatccgcctggccaggattggacgaatcctacgcctgatcaaaggcgccaaggggatccgcactctgctctttgctctgatgatgtcccttcctgcgctgttcaacatcggcctcctgcttttcctggtcatgttcatctacgccatctttgggatgtccaactttgcctacgttaagagggaagttggaattgatgacatgttcaactttgagacttttggcaacagcatgatctgcctgttccaaatcaccacctctgccggctgggacggactgctggcccctatactaaatagcggacctcctgactgtgaccctgaaaaagatcaccctggaagctcggtgaagggggactgtgggaacccatctgtggggattttcttttttgtcagctacatcatcatatccttcctggtggtggtgaacatgtacatcgctgtcatcctggagaacttcagcgtcgccaccgaagaaagtgcagagcctctgagtgaggacgactttgagatgttctacgaggtctgggagaagttcgaccctgacgccactcagttcatagagttctgcaagctttctgactttgcagctgccctggatcctcccctcctcatcgcaaagccaaacaaagtccagctcattgccatggacctgcccatggtgagtggagaccgcatccactgcctggacatcttgtttgcttttacaaagcgggtcctgggcgagagtggagagatggacgctcttcgaatccagatggaagaaaggttcatggcttccaacccctccaaggtctcttatgagcccattaccaccaccctgaaacggaaacaagaggaggtgtctgctattgtcatccagcgagcatacaggcggtatctcctgaagcagaaagttaagaaagtttcgtctatctataaaaaagacaaaggtaaagaagacgagggaacgcccatcaaagaagacatcatcacagataaactgaacgagaattcaactccagagaagactgatgtgacaccttccacaacttctccaccttcctacgatagcgtgacgaaaccggagaaggaaaaatttgaaaaggacaaatcagaaaaagaggacaaagggaaagatatcagggaaagtaaaaagtaaaaaaataaaataataataataataacgaaaattaaaaattaaaaaaaaagaatattccatttcgtgatcaactgtttacagcctgtgttggtgatgtatctgtgactccctcaggaggtccatgccaaactgactgtttctctaagtgtatacttaaggtcagtgcctataacaagacaggacctcgggtcagcacactgggattcaccaaaccagacaaagagcaccgacgggaggcttctatgttcacaaccagctgacactgctgaagagcggagagcaatggctactcagactagaagaacatggaaacggggaggaaagttaaatttttatgtaaatttaacatgtgacacttgatagcggtaactgtcaccactgtttgtgttttaactgccacacctgccatatttttacaaaatgtgtgctgtgactttatcactttttttttttgattcacgggttgtttactcttatatgtgactatttttgtaaacgggtttatgttcggggagagggattacggaggggattcgacgtttctctatgtataacgagatctattttcaacgaaggtaatgctgcagctctcattcacacacgacgatatcccatcacaccaggaaagagcttacttctcatttcaggatgtttttagattttttgaggtgcttaaatagctattcatatttttaaggtgtttcatccagaggaattttaatgtgcctgtaaatgttccatagaaccacaaccatcaaaaagagttgttttatttttacatagttcattatatgtacatgtatatatgtctatatgtatatggccgtgtatatacatatatatgtatacacacatgcatacatatgcacacacagaccatcacatgctcagagtcctgacagcatgactataacatttttttaataagtgtcctttggtaaaaaaaaatatatatacatatatatatatatctcctatcagtcctttctaagaaacccaaactaccaaaaaccacccccacggccactttctgaagttggttctgcttttttttccctgcagtattgtttagccatcttctgctcttggtaaggttgacatagtgtatgtcaattaaaaaacaacaacagcaacaaagtctgctttgtaaatagtaattttacccagtggtgcatgtttgagcaaatgaaaatgatttaagcacagtatttactgcatcaaatatgtaccacagttaagtatagtttgcaagctttcaacaggcgacatggtgtcactgggtcccttagagtttgaagctgtcaccgctgcatgtctctcttgctgatgccgctgtatcttaacccttctgctgttcagaagtctaacagggaagccatacgtcggtggcgaagtgaagcaaatcggtccaccaggaactcactcttcgtgacatgagccatgggttgcggtaaacgggaaggagatccttgttcttggttctcccaaaccttaatggaacagccggtgagatgtctgacagtgtaagctgcttagatctgttaaaagtatgtgcttcgagttttctaaggaaatatacatattgtaaaaaagggggggctcattttattttatttcaaagccttttgtacataaaatgggaaattaaaagtatcttcaggttgacgtcacagttctaccgttagtttctgttccccggcactttttaatcaaggcacttcgtcacggaagagataaggcctaagaggcagtgtagggctctggctgtcgttgttggtactgtggacttgcgcgtatttccacttgaaacaattctcattccaagtctaatgtccatttgctttcaatagtgatgccttatcattgacaagagatttcaaggggagcagatgacactcttggcattgcctgagtaggatgtcctcacctagtgtttctcctctactcatccatcttttttaatgttcgtttacacagatagatagatggatagatagaatcttactcatccacatggcaccagagctgtttcaggtatgattcgggaaccaagcgctctctctctctctctctctctctctctctctctctctctctctctctctctctctctgttttccacaaaaccagttagtgaaatgatatcgccaattacagccaaacactttgtttcacagacaaccttcaatgtagattctttatactaaagctgttgacttgtagcgtgttcatgaatgcatgcaggaaaatgctattaccatacagagctaccggtaagccacattacgatcaagccaaaagaataaagatttttttttttgcttt

SEQ ID NO: 2323 - protein, 2005 aa, Rattus norvegicus
  ref <308>: DATABASE ACCESSION NUMBER: Refseq / NP_036779
  ref <309>: DATABASE ENTRY DATE: 2002-11-05
MARSVLVPPGPDSFRFFTRESLAAIEQRIAEEKAKRPKQERKDEDDENGPKPNSDLEAGKSLPFIYGDIPPEMVSEPLEDLDPYYINKKTFIVLNKGKAISRFSATSALYILTPFNPIRKLAIKILVHSLFNVLIMCTILTNCVFMTMSNPPDWTKNVEYTFTGIYTFESLIKILARGFCLEDFTFLRNPWNWLDFTVITFAYVTEFVNLGNVSALRTFRVLRALKTISVIPGLKTIVGALIQSVKKLSDVMILTVFCLSVFALIGLQLFMGNLRNKCLQWPPDNSTFEINITSFFNNSLDWNGTAFNRTVNMFNWDEYIEDKSHFYFLEGQNDALLCGNSSDAGQCPEGYICVKAGRNPNYGYTSFDTFSWAFLSLFRLMTQDFWENLYQLTLRAAGKTYMIFFVLVIFLGSFYLINLILAVVAMAYEEQNQATLEEAEQKEAEFQQMLEQLKKQQEEAQAAAAAASAESRDFSGAGGIGVFSESSSVASKLSSKSEKELKNRRKKKKQKEQAGEEEKEDAVRKSASEDSIRKKGFQFSLEGSRLTYEKRFSSPHQSLLSIRGSLFSPRRNSRASLFNFKGRVKDIGSENDFADDEHSTFEDNDSRRDSLFVPHRHGERRPSNVSQASRASRGIPTLPMNGKMHSAVDCNGVVSLVGGPSALTSPVGQLLPEGTTTETEIRKRRSSSYHVSMDLLEDPSRQRAMSMASILTNTMEELEESRQKCPPCWYKFANMCLIWDCCKPWLKVKHVVNLVVMDPFVDLAITICIVLNTLFMAMEHYPMTEQFSSVLSVGNLVFTGIFTAEMFLKIIAMDPYYYFQEGWNIFDGFIVSLSLMELGLANVEGLSVLRSFRLLRVFKLAKSWPTLNMLIKIIGNSVGALGNLTLVLAIIVFIFAVVGMQLFGKSYKECVCKISNDCELPRWHMHHFFHSFLIVFRVLCGEWIETMWDCMEVAGQTMCLTVFMMVMVIGNLVVLNLFLALLLSSFSSDNLAATDDDNEMNNLQIAVGRMQKGIDFVKRKIREFIQKAFVRKQKALDEIKPLEDLNNKKDSCISNHTTIEIGKDLNYLKDGNGTTSGIGSSVEKYVVDESDYMSFINNPSLTVTVPIALGESDFENLNTEEFSSESDMEESKEKLNATSSSEGSTVDIGAPAEGEQPEAEPEESLEPEACFTEDCVRKFKCCQISIEEGKGKLWWNLRKTCYKIVEHNWFETFIVFMILLSSGALAFEDIYIEQRKTIKTMLEYADKVFTYIFILEMLLKWVAYGFQMYFTNAWCWLDFLIVDVSLVSLTANALGYSELGAIKSLRTLRALRPLRALSRFEGMRVVVNALLGAIPSIMNVLLVCLIFWLIFSIMGVNLFAGKFYHCINYTTGEMFDVSVVNNYSECQALIESNQTARWKNVKVNFDNVGLGYLSLLQVATFKGWMDIMYAAVDSRNVELQPKYEDNLYMYLYFVIFIIFGSFFTLNLFIGVIIDNFNQQKKKFGGQDIFMTEEQKKYYNAMKKLGSKKPQKPIPRPANKFQGMVFDFVTKQVFDISIMILICLNMVTMMVETDDQSQEMTNILYWINLVFIVLFTGECVLKLISLRHYYFTIGWNIFDFVVVILSIVGMFLAELIEKYFVSPTLFRVIRLARIGRILRLIKGAKGIRTLLFALMMSLPALFNIGLLLFLVMFIYAIFGMSNFAYVKREVGIDDMFNFETFGNSMICLFQITTSAGWDGLLAPILNSGPPDCDPEKDHPGSSVKGDCGNPSVGIFFFVSYIIISFLVVVNMYIAVILENFSVATEESAEPLSEDDFEMFYEVWEKFDPDATQFIEFCKLSDFAAALDPPLLIAKPNKVQLIAMDLPMVSGDRIHCLDILFAFTKRVLGESGEMDALRIQMEERFMASNPSKVSYEPITTTLKRKQEEVSAIVIQRAYRRYLLKQKVKKVSSIYKKDKGKEDEGTPIKEDIITDKLNENSTPEKTDVTPSTTSPPSYDSVTKPEKEKFEKDKSEKEDKGKDIRESKK

SEQ ID NO: 2324 - DNA, 1911 bp, Rattus norvegicus
  ref <308>: DATABASE ACCESSION NUMBER: Refseq / NM_013185
  ref <309>: DATABASE ENTRY DATE: 2003-01-14
gaattccggtcgccggtaaaggcggctctgacccgctcggagcgccaacgcagcctccgtagcccgcaagtcttcgtcgcttgctccgggctctcgagtccgggccaccaggggcgcgcgctggggggtcgttcgagctgcgaggatccgggctgcccgcgaggcgaagggcgggtgcccaggatgggatgtgtgaagtccaggttcctccgagaaggaagcaaggcctcaaaaatagagccaaatgccaaccagaaaggccctgtgtatgtgccggatcccacgtcccctaagaagctgggaccgaacagcatcaacagcctgcccccggggttcgtggagggctctgaggacaccattgtggtcgcactgtacgactatgaggccattcaccgtgaagacctcagcttccagaagggagaccagatggtggttctggaggagtctggggagtggtggaaggcccgttccctggctaccaagaaagaaggctatatcccaagcaattatgtagctcgagttaactctttggagactgaggagtggttcttcaagggtatcagccggaaggatgcagagcgccacctgctggctcccgggaacatgctgggctccttcatgatccgggacagtgagaccaccaaagggagctactcactttctgttcgagactttgacccccagcacggagacacggtgaagcattataaaatccggacactggacagtggagggttctacatctctccgaggagcaccttcagcagcctgcaggaacttgtcgtccactacaagaaggggaaggatgggctctgccagaagctgtcagtgccctgtgtgtctccgaaaccccagaagccatgggagaaagatgcctgggagattcctcgagaatccctgcagatggagaagaaactgggagccgggcagtttggagaagtgtggatggccacctacaacaagcacaccaaagtggcggtgaagacaatgaagccagggagcatgtctgtggaggccttcctggcagaggccaacctgatgaagacgttacagcatgataaactggtgaagctacacgctgtggtctctcaggagcccatctttattgtcaccgagttcatggccaaaggaagcctgctggactttctcaagagtgaagaaggcagcaagcagccactgccaaaactcattgacttctcagcccagatttcagagggcatggctttcattgagcagaggaactacatccaccgagacctccgggctgccaacatcttggtttctgcatcactggtgtgtaagatcgctgactttggactggcacggatcatcgaggacaatgagtacacagctcgggaaggagccaagttccccatcaagtggacagctcctgaagccatcaactttggctccttcaccatcaagtcagatgtctggtcctttggtatcctgctgatggaaatcgtcacctacggccggatcccttacccaggtatgtcaaacccagaggtgattcgagcactagagcatgggtaccgtatgcctcgaccagataactgcccagaggagctctacagtatcatgatccgctgctggaagaaccgtccagaggaacggcccactttcgaatacatccagagcgtgctggatgacttctacacggccactgagagccagtatcagcagcaaccttgatgggccggaagaacatgagcacagccagaagccccatcagggccttgacatgctcgacctgctgggcccactctcagacgccccctcccccacattccagctgtcgagtggagggagaggacttcacaatctctttttgactctagtcatctgcaatctgccattctcagggcctccaagttagtgtttctcatttgcctggaatgaactgaattc

SEQ ID NO: 2325 - protein, 503 aa, Rattus norvegicus
  ref <308>: DATABASE ACCESSION NUMBER: Refseq / NP_037317
  ref <309>: DATABASE ENTRY DATE: 2003-01-14
MGCVKSRFLREGSKASKIEPNANQKGPVYVPDPTSPKKLGPNSINSLPPGFVEGSEDTIVVALYDYEAIHREDLSFQKGDQMVVLEESGEWWKARSLATKKEGYIPSNYVARVNSLETEEWFFKGISRKDAERHLLAPGNMLGSFMIRDSETTKGSYSLSVRDFDPQHGDTVKHYKIRTLDSGGFYISPRSTFSSLQELVVHYKKGKDGLCQKLSVPCVSPKPQKPWEKDAWEIPRESLQMEKKLGAGQFGEVWMATYNKHTKVAVKTMKPGSMSVEAFLAEANLMKTLQHDKLVKLHAVVSQEPIFIVTEFMAKGSLLDFLKSEEGSKQPLPKLIDFSAQISEGMAFIEQRNYIHRDLRAANILVSASLVCKIADFGLARIIEDNEYTAREGAKFPIKWTAPEAINFGSFTIKSDVWSFGILLMEIVTYGRIPYPGMSNPEVIRALEHGYRMPRPDNCPEELYSIMIRCWKNRPEERPTFEYIQSVLDDFYTATESQYQQQP

SEQ ID NO: 2326 - DNA, 2062 bp, Rattus norvegicus
  ref <308>: DATABASE ACCESSION NUMBER: Refseq / NM_024372
  ref <309>: DATABASE ENTRY DATE: 2003-01-13
ggcggcagggcggccatgactgcggagcaagcgctgcccctgggcaacgggaaggcggccgaggaggcgcgagggtccgaggcgctgggcggcggcggcgggggcgcggcggggacgcgcgaggcgcgcgacaaggcagtccacgagcgcggtcactggaacaacaaggtggagttcgtgttgagcgtagcgggagagatcatcggtctgggcaacgtgtggcgcttcccctacctgtgctacaagaacggcggaggggcattcctgattccttacgtggtgtttttcatctgctgtggaatccccgtcttcttcctggaaacggctctggggcagttcacgagcgagggcggcatcacgtgctggaggagagtctgtcctttatttgaaggcatcggctatgcaacacaggtgatcgaggcgcatctcaatgtctactacatcatcatcctggcgtgggccatcttctacttaagcaactgcttcaccaccgagctcccctgggccacctgtgggcatgagtggaacacagagaaatgtgtggagttccagaagctgaacttcagcaactacagtcatgtgtccctgcagaacgcaacctccccggtcatggagttctgggaacgccgggtcttggctatatctgatggcattgaacacatcgggaacctccgatgggagctggcactgtgtctcctggcggcttggaccatctgctacttctgcatctggaagggtacgaagtcaactggaaaggtcgtgtatgtcactgcaaccttcccctacatcatgctgctgatcctcctgatccgaggggtcacgttgccaggtgcctcggaaggcatcaagttctacctgtaccctgacctctcccggctctctgatccacaggtgtgggtggatgctgggacgcagatctttttctcctatgccatctgcctgggctgcctgaccgctctggggagttacaacaactataacaacaactgctacagggactgtattatgctctgctgtctgaacagtggcaccagcttcgtggctgggtttgctatcttctcagtcctgggcttcatggcgtacgagcagggcgtgcctattgctgaggtggcagaatcaggtcctggactggctttcatcgcctaccccaaggctgtcactatgatgcccctgtccccattgtgggccaccctgttcttcatgatgctcatcttcctgggcctggacagtcagtttgtgtgtgtggagagccttgtgacagccgtggttgacatgtaccccaaggtcttccggcggggctaccggcgagaactgctcatcctggccctgtccattgtctcttatttcctaggcctggtgatgctgacagagggaggcatgtacattttccagctttttgactcatacgcagccagtggcatgtgcttgctcttcgtggccatctttgagtgtgtctgcatcggctgggtgtatggaagtaacaggttctatgacaatattgaggacatgattggataccggccactgtcactcatcaagtggtgctggaaagttgtgacccctgggatctgtgcgggcatcttcatcttctttctggtcaagtacaagccgctcaagtacaacaatgtgtacacatatcctgcttggggctacggcattggctggctcatggctctgtcctccatgctgtgcatcccgctctggatcttcatcaagctgtggaagacagagggcaccctgcccgagaaattacagaagttgacagtccccagcgctgatctgaaaatgaggggcaagcttggggccagcccacggatggtgaccgttaatgactgtgaggccaaggtcaaaggcgacggtaccatctctgccatcacagagaaggagacgcacttctgatccccgccagccacttggatgtgtctccagccttccttccctgcgtgtaaatgaatcctgaaccttgtatttcacctaatgttaggggcttgctcgtctgcacaggatttattaacaagttaactcccagccggccactgtgtgccctgtaccctcacctcac

SEQ ID NO: 2327 - protein, 627 aa, Rattus norvegicus
  ref <308>: DATABASE ACCESSION NUMBER: Refseq / NP_077348
  ref <309>: DATABASE ENTRY DATE: 2003-01-13
MTAEQALPLGNGKAAEEARGSEALGGGGGGAAGTREARDKAVHERGHWNNKVEFVLSVAGEIIGLGNVWRFPYLCYKNGGGAFLIPYVVFFICCGIPVFFLETALGQFTSEGGITCWRRVCPLFEGIGYATQVIEAHLNVYYIIILAWAIFYLSNCFTTELPWATCGHEWNTEKCVEFQKLNFSNYSHVSLQNATSPVMEFWERRVLAISDGIEHIGNLRWELALCLLAAWTICYFCIWKGTKSTGKVVYVTATFPYIMLLILLIRGVTLPGASEGIKFYLYPDLSRLSDPQVWVDAGTQIFFSYAICLGCLTALGSYNNYNNNCYRDCIMLCCLNSGTSFVAGFAIFSVLGFMAYEQGVPIAEVAESGPGLAFIAYPKAVTMMPLSPLWATLFFMMLIFLGLDSQFVCVESLVTAVVDMYPKVFRRGYRRELLILALSIVSYFLGLVMLTEGGMYIFQLFDSYAASGMCLLFVAIFECVCIGWVYGSNRFYDNIEDMIGYRPLSLIKWCWKVVTPGICAGIFIFFLVKYKPLKYNNVYTYPAWGYGIGWLMALSSMLCIPLWIFIKLWKTEGTLPEKLQKLTVPSADLKMRGKLGASPRMVTVNDCEAKVKGDGTISAITEKETHF

SEQ ID NO: 2328 - DNA, 1292 bp, Rattus norvegicus
  ref <308>: DATABASE ACCESSION NUMBER: Refseq / NM_031095
  ref <309>: DATABASE ENTRY DATE: 2003-01-13
tcctagtgttacaggacatggagaaggaacgggagacactgcaggtctggaagcaacgtgtgggacaagagctcgattctgtgatcgctttctggatggagcattcccatgaccaggaacacgggggcttcttcacatgccttggccgcgatgggcaggtatatgatcacctcaaatatgtctggctgcaggggaggcaggtatggatgtattgtcgcttataccgcacttttgagcgcttccgccgtgtcgagcttctggatgcagcaaaagcaggtggtgaatttttgttgagttatgcccgggtggcaccgcctggcaagaaatgtgcttttgtgctgacccaggacggccgtccagtgaaggtgcagcggaccattttcagcgagtgcttttacaccatggccatgaatgaactgtggaaagtaacaggggaaatgcattatcagagagaagccgtagagatgatggatcagatcatccactgggtaagggaggacccagctgggctgggccggcctcagctctcgggaacactggccacagagcccatggcagtgcccatgatgctgctcaacctggtggagcagcttggagaagaagatgaggagatgaccgacaagtatgcagaactaggggactggtgtgcccataggattcttcagcatgtccagagggatggacaagttgtactggagaatgtatcagaggatggcaaagagctccctggttgccttggaagacatcagaacccaggccacacactggaagctggctggtttctgctccagtatgccctcaggaaaggtgatcccaaacttcaaaggcacattattgacaagtttctcttactgcctttccactctggatgggaccctgagcacggaggcctcttctacttccaggatgctgatgatctctgccctacccagctggaatggaacatgaagctgtggtggccacacactgaagccatgattgccttcctcatgggttacagggacagcggggacccagccttgctgaacctcttctaccaagtggctgaatacaccttccaccagtttcgtgatcctgagtacggggaatggtttggctacctgaaccaagagggaaaggtggcccttaccatcaaaggaggtccttttaaaggctgcttccatgtgccgcggtgcctggccatgtgcgagcagattttgggagccctactccaacgccttgggcccgcccccctcggctccttgcccgctgtccccactcgcgaaggctcgaaataaagctgaccctgttcc

SEQ ID NO: 2329 - protein, 419 aa, Rattus norvegicus
  ref <308>: DATABASE ACCESSION NUMBER: Refseq / NP_112357
  ref <309>: DATABASE ENTRY DATE: 2003-01-13
MEKERETLQVWKQRVGQELDSVIAFWMEHSHDQEHGGFFTCLGRDGQVYDHLKYVWLQGRQVWMYCRLYRTFERFRRVELLDAAKAGGEFLLSYARVAPPGKKCAFVLTQDGRPVKVQRTIFSECFYTMAMNELWKVTGEMHYQREAVEMMDQIIHWVREDPAGLGRPQLSGTLATEPMAVPMMLLNLVEQLGEEDEEMTDKYAELGDWCAHRILQHVQRDGQVVLENVSEDGKELPGCLGRHQNPGHTLEAGWFLLQYALRKGDPKLQRHIIDKFLLLPFHSGWDPEHGGLFYFQDADDLCPTQLEWNMKLWWPHTEAMIAFLMGYRDSGDPALLNLFYQVAEYTFHQFRDPEYGEWFGYLNQEGKVALTIKGGPFKGCFHVPRCLAMCEQILGALLQRLGPAPLGSLPAVPTREGSK

SEQ ID NO: 2330 - DNA, 495 bp, Rattus norvegicus
  ref <308>: DATABASE ACCESSION NUMBER: EMBL / AA799412
  ref <309>: DATABASE ENTRY DATE: 2000-03-03
catgaaaggttcaaaaccaaaagcggtttctctttgcagcaaatatacattaaaatagagtctctgtacagccaagggctctgggccctggcttgccccatggccctgcgcctccctggccaaacccaaaaataaatatagtgttattgctctgcagggcgtagaggcagtgctgtcccccatcccttgaggtgggagctgatagggggccctggccaccccagggcctcaagcatttccaaaaacagcttgtgcatggagtcagagttggcaagggccagagctttcagcaggacgtactcctcccgctccagccgtagggcttgcagccgccgaaccagctgcagcaaggctgcccccagatcccccagaccagcagcccgtgccccctcttcatccaggaccaggtcctcagcaaaggccaactcatcctgcaatggcagtgagcgctgggccacacccagcaccagcacctccatccacatactctgcagt

SEQ ID NO: 2331 - DNA, 2221 bp, Homo sapiens
  ref <308>: DATABASE ACCESSION NUMBER: Refseq / NM_004451
  ref <309>: DATABASE ENTRY DATE: 2003-01-15
tcctacaagcagccggcggcgccgccgagtgaggggacgcggcgcggtggggcggcgcggcccgaggaggcggcggaggaggggccgcccgcggcccccggctcactccggcactccgggccgctcggcccccatgcctgcccgaccgcgctgccggagccccaggtgaccagcgccatgtccagccaggtggtgggcattgagcctctctacatcaaggcagagccggccagccctgacagtccaaagggttcctcggagacagagaccgagcctcctgtggccctggcccctggtccagctcccactcgctgcctcccaggccacaaggaagaggaggatggggagggggctgggcctggcgagcagggcggtgggaagctggtgctcagctccctgcccaagcgcctctgcctggtctgtggggacgtggcctccggctaccactatggtgtggcatcctgtgaggcctgcaaagccttcttcaagaggaccatccaggggagcatcgagtacagctgtccggcctccaacgagtgtgagatcaccaagcggagacgcaaggcctgccaggcctgccgcttcaccaagtgcctgcgggtgggcatgctcaaggagggagtgcgcctggaccgcgtccggggtgggcggcagaagtacaagcggcggccggaggtggacccactgcccttcccgggccccttccctgctgggcccctggcagtcgctggaggcccccggaagacagcagccccagtgaatgcactggtgtctcatctgctggtggttgagcctgagaagctctatgccatgcctgaccccgcaggccctgatgggcacctcccagccgtggctaccctctgtgacctctttgaccgagagattgtggtcaccatcagctgggccaagagcatcccaggcttctcatcgctgtcgctgtctgaccagatgtcagtactgcagagcgtgtggatggaggtgctggtgctgggtgtggcccagcgctcactgccactgcaggatgagctggccttcgctgaggacttagtcctggatgaagagggggcacgggcagctggcctgggggaactgggggctgccctgctgcaactagtgcggcggctgcaggccctgcggctggagcgagaggagtatgttctactaaaggccttggcccttgccaattcagactctgtgcacatcgaagatgccgaggctgtggagcagctgcgagaagctctgcacgaggccctgctggagtatgaagccggccgggctggccccggagggggtgctgagcggcggcgggcgggcaggctgctgctcacgctaccgctcctccgccagacagcgggcaaagtgctggcccatttctatggggtgaagctggagggcaaggtgcccatgcacaagctgttcttggagatgctcgaggccatgatggactgaggcaaggggtgggactggtgggggttctggcaggacctgcctagcatggggtcagccccaagggctggggcggagctggggtctgggcagtgccacagcctgctggcagggccagggcaatgccatcagcccctgggaacaggccccacgccctctcctccccctcctagggggtgtcagaagctgggaacgtgtgtccaggctctgggcacagtgctgccccttgcaagccataacgtgcccccagagtgtagggggccttgcggaagccatagggggctgcacgggatgcgtgggaggcagaaacctatctcagggagggaaggggatggaggccagagtctcccagtgggtgatgcttttgctgctgcttaatcctaccccctcttcaaagcagagtgggacttggagagcaaaggcccatgcccccttcgctcctcctctcatcatttgcattgggcattagtgtccccccttgaagcaataactccaagcagactccagcccctggacccctggggtggccagggcttccccatcagctcccaacgagcctcctcagggggtaggagagcactgcctctatgccctgcagagcaataacactatatttatttttgggtttggccagggaggcgcagggacatggggcaagccagggcccagagcccttggctgtacagagactctattttaatgtatatttgctgcaaagagaaaccgcttttggttttaaacctttaatgagaaaaaaatatataataccgagctc

SEQ ID NO: 2332 - protein, 423 aa, Homo sapiens
  ref <308>: DATABASE ACCESSION NUMBER: Refseq / NP_004442
  ref <309>: DATABASE ENTRY DATE: 2003-01-15
MSSQVVGIEPLYIKAEPASPDSPKGSSETETEPPVALAPGPAPTRCLPGHKEEEDGEGAGPGEQGGGKLVLSSLPKRLCLVCGDVASGYHYGVASCEACKAFFKRTIQGSIEYSCPASNECEITKRRRKACQACRFTKCLRVGMLKEGVRLDRVRGGRQKYKRRPEVDPLPFPGPFPAGPLAVAGGPRKTAAPVNALVSHLLVVEPEKLYAMPDPAGPDGHLPAVATLCDLFDREIVVTISWAKSIPGFSSLSLSDQMSVLQSVWMEVLVLGVAQRSLPLQDELAFAEDLVLDEEGARAAGLGELGAALLQLVRRLQALRLEREEYVLLKALALANSDSVHIEDAEAVEQLREALHEALLEYEAGRAGPGGGAERRRAGRLLLTLPLLRQTAGKVLAHFYGVKLEGKVPMHKLFLEMLEAMMD

SEQ ID NO: 2333 - DNA, 3578 bp, Rattus norvegicus
  ref <308>: DATABASE ACCESSION NUMBER: Refseq / NM_012527
  ref <309>: DATABASE ENTRY DATE: 2002-11-05
agttggtgtgttcttccttggactatgtcagagagtcacaatgaccttgcacagtaacagtacaacctcgcctttgtttcccaacatcagctcttcctgggtgcacagtccctcggaggcagggctgcccttggggacagtcactcagttgggcagctacaacatttcacaagaaactgggaatttctcctcaaacgacacctccagcgaccctctcgggggtcacaccatctggcaagtggtcttcattgccttcttaactggcttcctggcattggtgaccatcattggcaacatccttgtcattgtggccttcaaggtcaacaaacagctgaagacagtcaacaactacttcctcttaagcctggcctgtgcagacctgatcatcggggtcatttccatgaacctgttcactacctacatcattatgaaccgttgggcactggggaacttagcctgcgacctctggctctccattgactatgtggccagcaatgcctctgtcatgaatctgctggtcatcagctttgacaggtacttttccatcactaggccactcacctaccgagccaaaagaacaacaaaacgacgtggtgtgatgattggtctggcttgggtcatctcctttgtcctatgggctcctgccatcttgttctggcaatactttgtagggaagagaactgtgcccccaggagaatgtttcattcagtttctgagtgagcccaccatcaccttcggcacggcgatcgctgccttttacatgcctgtcaccatcatgactattttatactggaggatctataaggaaactgagaagcgtaccaaagagctggctggcctacaggcctctgggacagaagcggaggcagaaaactttgtccaccccacaggcagttctcgaagctgtagcagctatgaactgcaacagcaaggcgtgaaacgatcatccaggaggaagtacggtcgctgtcacttctggttcaccaccaagagctggaagcccagtgccgagcagatggaccaagaccacagcagcagcgacagttggaacaacaacgatgctgctgcctccctggaaaactctgcttcctccgatgaagaggacattggctcagagaccagggccatctattccattgtcctcaagcttccaggccatagctccatcctcaactctaccaagctaccgtcctcagataacctgcaggtgtccaacgaggacctggggactgtggatgtggagagaaatgctcacaagcttcaggcccagaagagcatgggtgatggtgacaactgtcagaaggatttcaccaagcttcccatccagttagagtctgccgtggacacaggcaagacctctgacaccaactcctcggcagacaagaccacggctactctacctctgtccttcaaggaggccacgctggctaagaggtttgctctcaagaccagaagtcagatcaccaagcggaagaggatgtcgctcatcaaggagaagaaggccgcccagacgctcagtgccatcttgctagccttcatcatcacgtggaccccctacaacatcatggtcctggtgaacaccttctgtgacagctgcatacccaaaacctattggaatctgggctactggctgtgctatatcaacagcaccgtgaaccctgtgtgctatgccctgtgcaacaaaacattcagaaccaccttcaagacgctcctcttgtgccagtgtgacaaaaggaagaggcgcaaacagcagtaccagcagagacagtcggtcatttttcacaagcgagtgccggagcaggccttgtagaaaaggggtatgttgagagcagtgaccacgcaagcgcgtcagcccacacagcctagcaggagtctggcgcaggtggggggagccatccctgatggtgataaaatgggtttttatcgacctcacgggagagaagctacctgtttactgatccattgaataactgattttggtccaatgccaattcagcaggaaagaaggagaggcataccgctaaacatgaagagatgtgttctgaaacagacttttaagtggattttgtttcctctaagagaaaaagaaattattgtctcagagcaagtatcctcagaaattggtctgcctgggtctcttaattcctatcagctctggaatcactggtgagcctcaaggcactagatgccatgtgctctccctaagggtcccaaagtgtccatccagatcccatgtgaagcacggcaagcttgaaaaaaaaaatctgtggtcctgagttattttgtatattgcaaagctgacaccacttgtccccaatcagcttctgtcctctttcagtgtgttgtcaaactctattcgtggatttgactcttggttcttgcaacgtactgtttcgtgctgttcaagtttcacacaaataaaattgtacaggaacatgcatacctatacatgtgtgagtttccgcacgcacgcacattgtgtatataacgtgatggggaacactgaactgaaaggaagttcctaccatactttggtaactgaaactctctaggatcctcaaatgatatgaaactgaactaagcccagtttgacgttgtgttttggtctgggtttttgacactggagctatttcccacaaaccatcctgaagaataatatccagcacagagaatccagaccttctcagcaaacctgtgctagacagacagtcttgagggtcagtcggcaccgtgtcttgactggactcagtacgcactgtctcctgcactgttagctctctgtcgatggagctaaataaaccagggcccctttgagctcaaaagaacgaacttctgtacatgtttgaatttagtcgtccaaatctgaatgtttcaaaacaaaatttctgggatctgaactgctcgaaactcaatcctagagtcacctttgaatgtcacacacagcaatataatgtacatttacatagaaaaatcaaaggaaacgctgtgctcggagctgacggaggaaagtattgtattccacttcctgctacctggcaccttctgaaaggaaggtgggcttacctcctgtcacttagcaggagtcagaacccttctggtagtcactgtataaccttcacctaggagtggttggtgtctaggaagccatgcatcctctgaagaaagaatggcactagaaaaagtattacttcgaaatcgatttctttccattgtgacaaccgaatttcgcatcatcctttgaattgccccaagtgcaccgtgtttcctctgggggaggggtctgctgctctcattcttctggctgctgtattgttgggtttcttcttttccttctgctgggactgtgtggggagcgggtggggtggggggtgggagggctgtggagaacccttcccttgtgcagggcatccatccgtgttgtgaacccagagctgggggccaaagctgcttttgtattcagtgtgaggtggtgtttacagccgactttgacatcagtgggtgtgttctcagtggtgtgtctgtacctgaactatttaatgttgtgtcatgtttatataaagaatatttatgcatacttt

SEQ ID NO: 2334 - protein, 589 aa, Rattus norvegicus
  ref <308>: DATABASE ACCESSION NUMBER: Refseq / NP_036659
  ref <309>: DATABASE ENTRY DATE: 2002-11-05
MTLHSNSTTSPLFPNISSSWVHSPSEAGLPLGTVTQLGSYNISQETGNFSSNDTSSDPLGGHTIWQVVFIAFLTGFLALVTIIGNILVIVAFKVNKQLKTVNNYFLLSLACADLIIGVISMNLFTTYIIMNRWALGNLACDLWLSIDYVASNASVMNLLVISFDRYFSITRPLTYRAKRTTKRRGVMIGLAWVISFVLWAPAILFWQYFVGKRTVPPGECFIQFLSEPTITFGTAIAAFYMPVTIMTILYWRIYKETEKRTKELAGLQASGTEAEAENFVHPTGSSRSCSSYELQQQGVKRSSRRKYGRCHFWFTTKSWKPSAEQMDQDHSSSDSWNNNDAAASLENSASSDEEDIGSETRAIYSIVLKLPGHSSILNSTKLPSSDNLQVSNEDLGTVDVERNAHKLQAQKSMGDGDNCQKDFTKLPIQLESAVDTGKTSDTNSSADKTTATLPLSFKEATLAKRFALKTRSQITKRKRMSLIKEKKAAQTLSAILLAFIITWTPYNIMVLVNTFCDSCIPKTYWNLGYWLCYINSTVNPVCYALCNKTFRTTFKTLLLCQCDKRKRRKQQYQQRQSVIFHKRVPEQAL

SEQ ID NO: 2335 - DNA, 1773 bp, Homo sapiens
  ref <308>: DATABASE ACCESSION NUMBER: Refseq / NM_000740
  ref <309>: DATABASE ENTRY DATE: 2000-10-31
atgaccttgcacaataacagtacaacctcgcctttgtttccaaacatcagctcctcctggatacacagcccctccgatgcagggctgcccccgggaaccgtcactcatttcggcagctacaatgtttctcgagcagctggcaatttctcctctccagacggtaccaccgatgaccctctgggaggtcataccgtctggcaagtggtcttcatcgctttcttaacgggcatcctggccttggtgaccatcatcggcaacatcctggtaattgtgtcatttaaggtcaacaagcagctgaagacggtcaacaactacttcctcttaagcctggcctgtgccgatctgattatcggggtcatttcaatgaatctgtttacgacctacatcatcatgaatcgatgggccttagggaacttggcctgtgacctctggcttgccattgactacgtagccagcaatgcctctgttatgaatcttctggtcatcagctttgacagatacttttccatcacgaggccgctcacgtaccgagccaaacgaacaacaaagagagccggtgtgatgatcggtctggcttgggtcatctcctttgtcctttgggctcctgccatcttgttctggcaatactttgttggaaagagaactgtgcctccgggagagtgcttcattcagttcctcagtgagcccaccattacttttggcacagccatcgctgctttttatatgcctgtcaccattatgactattttatactggaggatctataaggaaactgaaaagcgtaccaaagagcttgctggcctgcaagcctctgggacagaggcagagacagaaaactttgtccaccccacgggcagttctcgaagctgcagcagttacgaacttcaacagcaaagcatgaaacgctccaacaggaggaagtatggccgctgccacttctggttcacaaccaagagctggaaacccagctccgagcagatggaccaagaccacagcagcagtgacagttggaacaacaatgatgctgctgcctccctggagaactccgcctcctccgacgaggaggacattggctccgagacgagagccatctactccatcgtgctcaagcttccgggtcacagcaccatcctcaactccaccaagttaccctcatcggacaacctgcaggtgcctgaggaggagctggggatggtggacttggagaggaaagccgacaagctgcaggcccagaagagcgtggacgatggaggcagttttccaaaaagcttctccaagcttcccatccagctagagtcagccgtggacacagctaagacttctgacgtcaactcctcagtgggtaagagcacggccactctacctctgtccttcaaggaagccactctggccaagaggtttgctctgaagaccagaagtcagatcactaagcggaaaaggatgtccctggtcaaggagaagaaagcggcccagaccctcagtgcgatcttgcttgccttcatcatcacttggaccccatacaacatcatggttctggtgaacaccttttgtgacagctgcatacccaaaaccttttggaatctgggctactggctgtgctacatcaacagcaccgtgaaccccgtgtgctatgctctgtgcaacaaaacattcagaaccactttcaagatgctgctgctgtgccagtgtgacaaaaaaaagaggcgcaagcagcagtaccagcagagacagtcggtcatttttcacaagcgcgcacccgagcaggccttgtag

SEQ ID NO: 2336 - protein, 590 aa, Homo sapiens
  ref <308>: DATABASE ACCESSION NUMBER: Refseq / NP_000731
  ref <309>: DATABASE ENTRY DATE: 2000-10-31
MTLHNNSTTSPLFPNISSSWIHSPSDAGLPPGTVTHFGSYNVSRAAGNFSSPDGTTDDPLGGHTVWQVVFIAFLTGILALVTIIGNILVIVSFKVNKQLKTVNNYFLLSLACADLIIGVISMNLFTTYIIMNRWALGNLACDLWLAIDYVASNASVMNLLVISFDRYFSITRPLTYRAKRTTKRAGVMIGLAWVISFVLWAPAILFWQYFVGKRTVPPGECFIQFLSEPTITFGTAIAAFYMPVTIMTILYWRIYKETEKRTKELAGLQASGTEAETENFVHPTGSSRSCSSYELQQQSMKRSNRRKYGRCHFWFTTKSWKPSSEQMDQDHSSSDSWNNNDAAASLENSASSDEEDIGSETRAIYSIVLKLPGHSTILNSTKLPSSDNLQVPEEELGMVDLERKADKLQAQKSVDDGGSFPKSFSKLPIQLESAVDTAKTSDVNSSVGKSTATLPLSFKEATLAKRFALKTRSQITKRKRMSLVKEKKAAQTLSAILLAFIITWTPYNIMVLVNTFCDSCIPKTFWNLGYWLCYINSTVNPVCYALCNKTFRTTFKMLLLCQCDKKKRRKQQYQQRQSVIFHKRAPEQAL

SEQ ID NO: 2337 - DNA, 2557 bp, Rattus norvegicus
  ref <308>: DATABASE ACCESSION NUMBER: EMBL / E07296
  ref <309>: DATABASE ENTRY DATE: 2000-09-02
ctccagggaagcaacagagagaagaaaagaaaggtacatggctacttcccactctcagcctagaagaataaacccttagattgcgggggaactgagccaggcaagccacaggcagccttgagcgcccccttgcctgccctcccctgcgggggccaggatgctgaagaagcagtctgcagggcttgtgctttggggtgctatcatctttgtgggctggaatgccctgctgctcctcttcttctggacacgcccagcacctggcaggctgccctcagacagtgcccttggtgatgaccctgccagcctcacccgtgaggtcatccacctggccgaggacgccgaggcggagttggagcggcagcggggactactgcagcagatcaaggagcattattctctgtggaggcagaggtggagagttcccaccgtggcccctccagcctggccccgtgtgcctgggaccccctcaccagctgtgatccccattctggtcattgcctgtgaccgcagcactgtccggcgctgcctggataagttgttgcactatcggccctctgctgagcatttccccattattgtcagtcaagactgtgggcatgaagagacagcacaggtcattgcttcttatggcaccgctgtcacacacatccggcagccagacctgagtaacattgccgtgcagccagaccaccgtaagttccagggttactacaagattgccaggcactaccgctgggcgctaggccagatcttcaacaagttcaagttcccggctgctgtggtagtggaggatgatctggaagtggcgccggacttcttcgagtacttccaggccacctacccgctgctgaaagcagacccctccctttggtgtgtgtcggcttggaatgataatggtaaggagcagatggtggactccagcaaacctgagctgctctatcgaacagacttttttcctggccttggatggctgctgttggctgatctctgggcagaactagagcccaagtggcccaaggccttctgggacgactggatgcgcagacctgagcagcggaaggggcgggcttgtattcgtccagaaatttcaagaactatgacatttggtcgcaagggtgtgagccatgggcagttctttgaccagcatcttaaattcatcaagctgaaccagcagttcgtgcccttcacccagttggacctgtcgtacctgcagcgggaggcctatgaccgggacttccttgcccaggtctatggtgccccccagctgcaggtggagaaagtgaggaccaatgatcggaaggaactgggggaggtgcgggtacagtacactagcagagacagctttaaggcctttgctaaggccctgggtgtcatggacgacctcaagtctggtgttcccagagctggctaccgtggcattgtcactttccagttccggggtcggcgtgtccacctggcacccccagagacatggaatggctatgatcctagctggaattagtggcacctgcctttccctcctgggtctccttgccgtatgatgagccgaggcagcctgcaggccctgggctataccattctgccagtgtttcctcttggatctatagatcttccctttttgtcctggccttcccccaagtggcattctagtgcacaaatcataagatgagggttatactcctcttgtcaagggagtactgtgtggtatgttcggggcatattgaacaagaaaccactgtgtggtgtggggagggttggacctgttggaccaggcttgtagtgtcctgagttctctccaagggcatctgcggagagcttggccactccagctctcctgaccaggcctctccaccctgatctggctcctgttagtacatgagcccactttatgtaccttccccactttctccaccttccccagggtggggccggattatggaagaaggaatagatttgtggccaactgagactaaccaaagggattcactgtcagagttagattgcatggccgggttgccggggtcactgcctcctggcttctcttcctgccgactttgccagtgctcttcttgtcctgcagtggagcagtgtgttgtgagatggaaagtaggagctaaagcaagacctctcccgtggtggagcagttgtcaggaacaatgacaggcggaaagcctacacttgggcacccctcttcttgcccatggccccccacttctgaaagttagttccctttgcattctttagggggattcagtggcagcctagtgggggacagtgggctccacgcctctttcccctggggttggtacagcctcctcccacagggcttgttcctggtggccatctcagcaaagtcaccagcagctgagaccaggacacctgtggcccttcctaagcattcccacatcttcccaggccgaggggcaggtggcaggctagagagaaagaaatttgtgtgttttgtttgttgcctgatcttagtttcatggaagaaaatggaatctacagaattattttcaaaaataaagtaaaggctgaattgtctgaaaaaaaaaaa

SEQ ID NO: 2338 - DNA, 560 bp, Rattus norvegicus
  ref <308>: DATABASE ACCESSION NUMBER: EMBL / AA875405
  ref <309>: DATABASE ENTRY DATE: 2000-03-03
aagctgagagtctcggcaaggcccccacacccagtgtggctccggagagcatcgggagcagctaccagtgccggatgcagacgctgaatttctgtatgggggctgacccaggccttgaacacctcttgacctctgcagtcgccactcctggatcctcaacaccttcggcctctcaccgggctccactgcccctgccagctgactccaaggaaccgtgggtgcctgggggcttccctgtccagggaggttctggctatccactgggattacccccttgtctttaccggacaccgggaatgttcttcttcgagtgactgactgcagcagcccctctgtagggcttctgtcaactgttccctggagactcagactggctatgtgacctagggtattctgcaagaacccagccctggcaggccaaggactgtgaggaccggaaggcagaagtgagcagtcagccaggtccctggggggacctactgacaaacttgggatgtggggaaatggaaccctcaacatttttctctgtggttctcagggctaataaagccagtgagatg

SEQ ID NO: 2339 - DNA, 1715 bp, Rattus norvegicus
  ref <308>: DATABASE ACCESSION NUMBER: Refseq / NM_017221
  ref <309>: DATABASE ENTRY DATE: 2003-01-14
ttaaaatcaggctctttttgtcttttaattgccgtctcgagacccaactccgatgtgttccgttaccagcgaccggcagcctgccatcgcagcccctgtctgggtggggatcggagacaagtcccctgcagcaacagcaggcaaggttatataggaagagaaagagccaggcagcgccagagggaacgaacgagccgagcgaggaagggagagccgagcgcaaggaggagcgcacacgcacacacccgcgcgtaccagctcgcgcacagaccggcgcggggacggctcgcaagtcctcaggttccgcggacgagatgctgctgctgctggccagatgttttctggtggcccttgcttcctcgctgctggtgtgccccggactggcctgtgggcccggcagggggtttggaaagaggcagcaccccaaaaagctgacccctttagcctacaagcagtttatccccaacgtagccgagaagaccctaggggccagcggccgatatgaagggaagatcacaagaaactccgaacgatttaaggaactcacccccaattacaaccccgacatcatatttaaggatgaggaaaacactggagcagaccggctgatgactcagaggtgcaaagacaagttaaatgccttggccatctccgtgatgaaccagtggcctggagtgaagcttcgagtgactgagggctgggatgaggacggccatcattcagaggagtctctacactatgagggtcgagcagtggacatcaccacgtctgacagggaccgcagcaagtatggcatgctggctcgcctggctgtggaggctggattcgactgggtctactatgaatccaaagctcgcatccactgctctgtgaaagcagagaactccgtggcggccaaatctgacggctgcttcccgggatcagccacagtgcacctggagcagggtggcaccaagttagtgaaggatctaagtcccggggaccgcgtgctggcggctgacgaccagggccggctgctgtacagcgacttcctcaccttcctggaccgcgacgaaggtgccaagaaggtcttctacgtgatcgagacgcgggagccgcgggagcgtctgctgctcactgccgcgcacctgctcttcgtggcgccgcacaacgactccgggcccactccgggaccgagcccactcttcgccagccgcgtgcgtccggggcagcgcgtgtacgtggtggctgaacgcggcggggaccgccggctgctgcccgccgcggtgcacagcgtaacgctacgagaggaggcggcgggtgcgtacgcgccgctcacggcggacggcaccattctcatcaaccgggtgctcgcctcgtgctacgcagtcatcgaggagcacagctgggcacaccgggccttcgcgcccttccgcctggcgcacgcgctgctggccgcgctggcacccgcccgcacggacggcgggggcgggggcagcatccctgccccgcaatctgtagcggaagcgaggggcgcagggccgcctgcgggcatccactggtactcgcagctgctgtaccacattggcacctggctgttggacagcgagaccctgcatcccttgggaatggcagtcaagtccagctgaagtccgacgggaccgggcagggggcgtgggggcgggcggggcgggaagcgactgccagataagcaaccgggaaagcgcacggaagga

SEQ ID NO: 2340 - protein, 437 aa, Rattus norvegicus
  ref <308>: DATABASE ACCESSION NUMBER: Refseq / NP_058917
  ref <309>: DATABASE ENTRY DATE: 2003-01-14
MLLLLARCFLVALASSLLVCPGLACGPGRGFGKRQHPKKLTPLAYKQFIPNVAEKTLGASGRYEGKITRNSERFKELTPNYNPDIIFKDEENTGADRLMTQRCKDKLNALAISVMNQWPGVKLRVTEGWDEDGHHSEESLHYEGRAVDITTSDRDRSKYGMLARLAVEAGFDWVYYESKARIHCSVKAENSVAAKSDGCFPGSATVHLEQGGTKLVKDLSPGDRVLAADDQGRLLYSDFLTFLDRDEGAKKVFYVIETREPRERLLLTAAHLLFVAPHNDSGPTPGPSPLFASRVRPGQRVYVVAERGGDRRLLPAAVHSVTLREEAAGAYAPLTADGTILINRVLASCYAVIEEHSWAHRAFAPFRLAHALLAALAPARTDGGGGGSIPAPQSVAEARGAGPPAGIHWYSQLLYHIGTWLLDSETLHPLGMAVKSS

SEQ ID NO: 2341 - DNA, 399 bp, Rattus norvegicus
  ref <308>: DATABASE ACCESSION NUMBER: EMBL / AA892607
  ref <309>: DATABASE ENTRY DATE: 2000-03-03
tgtcccccagggagtctttttttttctagattattccagccaagcctcatcatccttactctcttatgctcttcggctggcacagacttttacatatttttcaccatgcacatttccagctgttcctttcctcctttgtgatggcagcaaacaggacctgccacggctgctggacgggcagcatctggctctgtttcaggataactgttggtttgtttgtttgtttgtttttgctgttttgtttaaaaaagaaaaaaaagggcatttgaggagccagagagatggctcagtgggcatcttgcaacttaagtgtgatccgggggacccacatggtgtaaggagagagccagctcctccatacatgccatggtgcatgcatgggcacacacacacacacgt

SEQ ID NO: 2342 - DNA, 1665 bp, Rattus norvegicus; identical to SEQ ID NO: 2249
  ref <308>: DATABASE ACCESSION NUMBER: Refseq / NM_021746
  ref <309>: DATABASE ENTRY DATE: 2003-01-13

SEQ ID NO: 2343 - protein, 367 aa, Rattus norvegicus; identical to SEQ ID NO: 2250
  ref <308>: DATABASE ACCESSION NUMBER: Refseq / NP_068514
  ref <309>: DATABASE ENTRY DATE: 2003-01-13

SEQ ID NO: 2344 - DNA, 1457 bp, Homo sapiens; identical to SEQ ID NO: 2251
  ref <308>: DATABASE ACCESSION NUMBER: Refseq / NM_002969
  ref <309>: DATABASE ENTRY DATE: 2002-11-05

SEQ ID NO: 2345 - protein, 367 aa, Homo sapiens; identical to SEQ ID NO: 2252
  ref <308>: DATABASE ACCESSION NUMBER: Refseq / NP_002960
  ref <309>: DATABASE ENTRY DATE: 2002-11-05

SEQ ID NO: 2346 - DNA, 557 bp, Rattus norvegicus
  ref <308>: DATABASE ACCESSION NUMBER: Refseq / NM_022396
  ref <309>: DATABASE ENTRY DATE: 2003-01-13
gtgacttctgggcccagctctggggcaaagatgcccgcccttcacattgaggatctgccggaaaaggaaaaactgaagatggaggttgagcaacttcgcaaagaagtgaagttgcagagacaacaggtgtctaaatgttctgaggaaataaagaactacattgaagaacgttctggagaggatcctctggtaaagggaattccagaagacaagaatcccttcaaagaaaagggcagctgtgtcatttcctaaggaactctggagggaaattgttttcagttgggtcagattgttcttttgtttaatttttcccccaaatgaagccaaagtgtgtgtgaagaattgaggaaaaatgaaatcgagaaaaagactgtcatataagcactctccaagcactttgtgcatagaacaaacctgcttctcacccacacaccctctctcagaggagagcacctgagtgcagttattggatgaaggcctggctctccctttcaatatactgcttgctgtctccaataaagttttacctcgaaaaaaaaaaaaaaaaaaaaaaaaaa

SEQ ID NO: 2347 - protein, 73 aa, Rattus norvegicus
  ref <308>: DATABASE ACCESSION NUMBER: Refseq / NP_071791
  ref <309>: DATABASE ENTRY DATE: 2003-01-13
MPALHIEDLPEKEKLKMEVEQLRKEVKLQRQQVSKCSEEIKNYIEERSGEDPLVKGIPEDKNPFKEKGSCVIS

SEQ ID NO: 2348 - DNA, 884 bp, Homo sapiens
  ref <308>: DATABASE ACCESSION NUMBER: Refseq / NM_004126
  ref <309>: DATABASE ENTRY DATE: 2002-04-10
cagggcctgtccgtggccagcatccctgctgggcgattgagcagcgggaagctgcttggacccagtctcaaacttaaccctcatctagcacccgggcaggcctcctgggttgcagggacttgagaaaaggcagagttctcaggtcctaggaagctggggcacgctggcgtgacaagcgtcccggagaaagccaagccctcggggagctggggaccgcagcagggctgcagtcacatcctgcgcgggtgggcggcgggccaggccttcagttgtttcgggacgcgccgagcttcgccgctcttccagcggctccgctgccagagctagcctgagcccggttctggggcgaaaatgcctgcccttcacatcgaagatttgccagagaaggaaaaactgaaaatggaagttgagcagcttcgcaaagaagtgaagttgcagagacaacaagtgtctaaatgttctgaagaaataaagaactatattgaagaacgttctggagaggatcctctagtaaagggaattccagaagacaagaacccctttaaagaaaaaggcagctgtgttatttcataaataacttgggagaaactgcatcctaagtggaagaactagttgttttagttttcccagataaaaccaacatgctttttaaggaaggaagaatgaaattaaaaggagactttcttaagcaccatatagatagggttatgtataaaagcatatgtgctactcatctttgctcactatgcagtcttttttaagagagcagagagtatcagatgtacaattatggaaataagaacattacttgagcatgacacttctttcagtatattgcttgatgcttcaaataaagttttgtcttgggaaaaaaaaaaaaaaaa

SEQ ID NO: 2349 - protein, 73 aa, Homo sapiens; identical to SEQ ID NO: 2347
  ref <308>: DATABASE ACCESSION NUMBER: Refseq / NP_004117
  ref <309>: DATABASE ENTRY DATE: 2002-04-10

SEQ ID NO: 2350 - DNA, 1742 bp, Rattus norvegicus
  ref <308>: DATABASE ACCESSION NUMBER: Refseq / NM_017246
  ref <309>: DATABASE ENTRY DATE: 2003-01-14
atacattccccttgtcacttcttggggctcctaagtaggggccagtcggtactccttgccgcaggatgtgagaccctttaacctgtaatgctgtggctggcccttggcccctttcgtgccatggagaaccaggtgctggtgattcggatcaagattccaaatagtggcgcggtggactggaccgtgcactccgggccgcagttactcttcagggacgtgctggatgtgataggccaggttctgcctgaagcaacgacgacagcctttgaatatgaagatgaagatggtgataggattacagtaagaagtgacgaagagatgaaggcaatgctgtcctactattattccacagtaatggaacagcaagtaaatggccagctaatagagccgctgcagatctttccaagagcctgcaagcctcctggggaacggaacatacatggcctgaaggtgaatacacgggctggaccatctcagcacaccagccctgtggtctcagattcacttccaagcaatagcttgaagaagtcctcggctgaactgagaaagatactggccaacggccagatgaatgaacaagacatacggtatcgagacacccttggtcatggcaacggaggcacagtctacaaagcatatcatgtcccaagtgggaaaatcttagctgtaaaggttattctgttagacatcacactggagcttcagaagcagatcatgtctgagttggaaattctttataagtgtgactcatcgtatatcataggattttacggggcattttttgtagaaaacaggatttcgatttgtacagaattcatggatggggggtctttggatgtatataggaaaattccagagcacgtcctcggaagaattgcagtagcagttgttaaaggccttacctatctgtggagtttaaagattttacacagagatgtgaagccttccaacatgcttgtaaacacaagcggacaggtcaagctgtgtgacttcggcgtgagcacccagctggtgaattctatagccaagacgtatgttggaacaaatgcttatatggcacccgaaaggatttcaggagagcagtatgggatccattccgacgtgtggagcttagggatctctttcatggagattcagaaaaaccagggatctttaatgcctctccagcttctgcagtgcattgttgatgaggattcgccggtccttccgcttggagagttctcggagccgtttgtacatttcatcactcagtgcatgaggaagcagcccaaggaaagaccagcgcccgaggagctgatgggtcacccattcatcgtgcagttcaatgacggaaacgccactgtggtgtccatgtgggtttgccgagctctggaggagagacggagccagcaggggcccccatgagacctcagcaggacactgaccacccaggaccaggcatcaaggtcacaacaagccgcgacccctctgtctgctgcctgattgggaagagatgtactgggcacagctcctgctttcaccttctaccttacctgggagtcttcaagaagggtggtctctgccgaacccctcaccactggtagggaggaggcactgacaatggcaggtggagatggtgcagggttggggtgatgaggttatggaacctcctctggccccaccctcatctctccctactgttgtaaagggtcagcctatcagcagcactgatgggaataaagtattactgctttggattgtag

SEQ ID NO: 2351 - protein, 438 aa, Rattus norvegicus
  ref <308>: DATABASE ACCESSION NUMBER: Refseq / NP_058942
  ref <309>: DATABASE ENTRY DATE: 2003-01-14
MLWLALGPFRAMENQVLVIRIKIPNSGAVDWTVHSGPQLLFRDVLDVIGQVLPEATTTAFEYEDEDGDRITVRSDEEMKAMLSYYYSTVMEQQVNGQLIEPLQIFPRACKPPGERNIHGLKVNTRAGPSQHTSPVVSDSLPSNSLKKSSAELRKILANGQMNEQDIRYRDTLGHGNGGTVYKAYHVPSGKILAVKVILLDITLELQKQIMSELEILYKCDSSYIIGFYGAFFVENRISICTEFMDGGSLDVYRKIPEHVLGRIAVAVVKGLTYLWSLKILHRDVKPSNMLVNTSGQVKLCDFGVSTQLVNSIAKTYVGTNAYMAPERISGEQYGIHSDVWSLGISFMEIQKNQGSLMPLQLLQCIVDEDSPVLPLGEFSEPFVHFITQCMRKQPKERPAPEELMGHPFIVQFNDGNATVVSMWVCRALEERRSQQGPP

SEQ ID NO: 2352 - DNA, 578 bp, Rattus norvegicus
  ref <308>: DATABASE ACCESSION NUMBER: EMBL / AA799755
  ref <309>: DATABASE ENTRY DATE: 2000-03-03
ggtgtgacgttggcttccttgcctccccaaaggctggcaggtagaaccgggggcttctgcagagactctgcttttggaggcctggtggtaacagggcccacccaggagcatctgatggctatgcgcctgccagcacaggctggggaaatgctgctttagtttgaattgggctagggctttgggaccccagtctcagaagtccccaaagttgactgtgtaggtctccactgttgtgactggaaacgtgaggcctgtgtccatctcctcctcctcctcctcctcctcctccagttcctccacctccaggtcaggcccatactctgtctcaaactctgtcactacctctgtataggtctcagtctctgactcctcccagcccgcagcggtagtgggtagaatttcccagagcctcgaggtactgcctggtgtaggggaaggaggcagcgtaagggcaggagtggggctcgtggcaaggcctgtggtagaattgaagcgccgcagcctcatctgttccctcatcctgagccggtaccgtaaccggcgctgctgcaagcgccgctgctggggtgtcattggtc

SEQ ID NO: 2353 - DNA, 3935 bp, Homo sapiens
  ref <308>: DATABASE ACCESSION NUMBER: Refseq / NM_001129
  ref <309>: DATABASE ENTRY DATE: 2003-01-17
tccctcgctcaccccatcctctctcccgccccttcctggattccctcacccgtctcgatcccctctccgccctttcccagagacccagagcccctgaccccccgcgccctccccggagccccccgcgcgtgccgcggccatggcggccgtgcgcggggcgcccctgctcagctgcctcctggcgttgctggccctgtgccctggagggcgcccgcagacggtgctgaccgacgacgagatcgaggagttcctcgagggcttcctgtcagagctagaacctgagccccgggaggacgacgtggaggccccgccgcctcccgagcccaccccgcgggtccgaaaagcccaggcggggggcaagccagggaagcggccagggacggccgcagaagtgcctccggaaaagaccaaagacaaagggaagaaaggcaagaaagacaaaggccccaaggtgcccaaggagtccttggaggggtcccccaggccgcccaagaaggggaaggagaagccacccaaggccaccaagaagcccaaggagaagccacctaaggccaccaagaagcccaaggaggagccacccaaggccaccaagaagcccaaagagaagccacccaaggccaccaagaagcccccgtcagggaagaggccccccattctggctccctcagaaaccctggagtggccactgcccccaccccccagccctggccccgaggagctaccccaggagggaggggcgcccctctcaaataactggcagaatccaggagaggagacccatgtggaggcacaggagcaccagcctgagccggaggaggagaccgagcaacccacactggactacaatgaccagatcgagagggaggactatgaggactttgagtacattcggcgccagaagcaacccaggccacccccaagcagaaggaggaggcccgagcgggtctggccagagccccctgaggagaaggccccggccccagccccggaggagaggattgagcctcctgtgaagcctctgctgcccccgctgccccctgactatggtgatggttacgtgatccccaactacgatgacatggactattactttgggcctcctccgccccagaagcccgatgctgagcgccagacggacgaagagaaggaggagctgaagaaacccaaaaaggaggacagcagccccaaggaggagaccgacaagtgggcagtggagaagggcaaggaccacaaagagccccgaaagggcgaggagttggaggaggagtggacgcctacggagaaagtcaagtgtccccccattgggatggagtcacaccgtattgaggacaaccagatccgagcctcctccatgctgcgccacggcctgggggcacagcgcggccggctcaacatgcagaccggtgccactgaggacgactactatgatggtgcgtggtgtgccgaggacgatgccaggacccagtggatagaggtggacaccaggaggactacccggttcacaggcgtcatcacccagggcagagactccagcatccatgacgattttgtgaccaccttcttcgtgggcttcagcaatgacagccagacatgggtgatgtacaccaacggctatgaggaaatgacctttcatgggaacgtggacaaggacacacccgtgctgagtgagctcccagagccggtggtggctcgtttcatccgcatctacccactcacctggaatggcagcctgtgcatgcgcctggaggtgctggggtgctctgtggcccctgtctacagctactacgcacagaatgaggtggtggccaccgatgacctggatttccggcaccacagctacaaggacatgcgccagctcatgaaggtggtgaacgaggagtgccccaccatcacccgcacttacagcctgggcaagagctcacgaggcctcaagatctatgccatggagatctcagacaaccctggggagcatgaactgggggagcccgagttccgctacactgctgggatccatggcaacgaggtgctgggccgagagctgttgctgctgctcatgcagtacctgtgccgagagtaccgcgatgggaacccacgtgtgcgcagcctggtgcaggacacacgcatccacctggtgccctcactgaaccctgatggctacgaggtggcagcgcagatgggctcagagtttgggaactgggcgctgggactgtggactgaggagggctttgacatctttgaagatttcccggatctcaactctgtgctctggggagctgaggagaggaaatgggtcccctaccgggtccccaacaataacttgcccatccctgaacgctacctttcgccagatgccacggtatccacggaggtccgggccatcattgcctggatggagaagaaccccttcgtgctgggagcaaatctgaacggcggcgagcggctagtatcctacccctacgatatggcccgcacgcctacccaggagcagctgctggccgcagccatggcagcagcccggggggaggatgaggacgaggtctccgaggcccaggagactccagaccacgccatcttccggtggcttgccatctccttcgcctccgcacacctcaccttgaccgagccctaccgcggaggctgccaagcccaggactacaccggcggcatgggcatcgtcaacggggccaagtggaacccccggaccgggactatcaatgacttcagttacctgcataccaactgcctggagctctccttctacctgggctgtgacaagttccctcatgagagtgagctgccccgcgagtgggagaacaacaaggaggcgctgctcaccttcatggagcaggtgcaccgcggcattaagggggtggtgacggacgagcaaggcatccccattgccaacgccaccatctctgtgagtggcattaatcacggcgtgaagacagccagtggtggtgattactggcgaatcttgaacccgggtgagtaccgcgtgacagcccacgcggagggctacaccccgagcgccaagacctgcaatgttgactatgacatcggggccactcagtgcaacttcatcctggctcgctccaactggaagcgcatccgggagatcatggccatgaacgggaaccggcctatcccacacatagacccatcgcgccctatgaccccccaacagcgacgcctgcagcagcgacgcctacaacaccgcctgcggcttcgggcacagatgcggctgcggcgcctcaacgccaccaccaccctaggcccccacactgtgcctcccacgctgccccctgcccctgccaccaccctgagcactaccatagagccctggggcctcataccgccaaccaccgctggctgggaggagtcggagactgagacctacacagaggtggtgacagagtttgggaccgaggtggagcccgagtttgggaccaaggtggagcccgagtttgagacccagttggagcctgagttcgagacccagctggaacccgagtttgaggaagaggaggaggaggagaaagaggaggagatagccactggccaggcattccccttcacaacagtagagacctacacagtgaactttggggacttctgagatcagcgtcctaccaagaccccagcccaactcaagctacagcagcagcacttcccaagcctgctgaccacagtcacatcacccatcagcacatggaaggcccctggtatggacactgaaaggaagggctggtcctgcccctttgagggggtgcaaacatgactgggacctaagagccagaggctgtgtagaggctcctgctccacctgccagtctcgtaagagatggggttgctgcagtgttggagtaggggcagagggagggagccaaggtcactccaataaaacaagctcatggcaaaaaaaaaaaaaaaaaaaaa

SEQ ID NO: 2354 - protein, 1158 aa, Homo sapiens
  ref <308>: DATABASE ACCESSION NUMBER: Refseq / NP_001120
  ref <309>: DATABASE ENTRY DATE: 2003-01-17
MAAVRGAPLLSCLLALLALCPGGRPQTVLTDDEIEEFLEGFLSELEPEPREDDVEAPPPPEPTPRVRKAQAGGKPGKRPGTAAEVPPEKTKDKGKKGKKDKGPKVPKESLEGSPRPPKKGKEKPPKATKKPKEKPPKATKKPKEEPPKATKKPKEKPPKATKKPPSGKRPPILAPSETLEWPLPPPPSPGPEELPQEGGAPLSNNWQNPGEETHVEAQEHQPEPEEETEQPTLDYNDQIEREDYEDFEYIRRQKQPRPPPSRRRRPERVWPEPPEEKAPAPAPEERIEPPVKPLLPPLPPDYGDGYVIPNYDDMDYYFGPPPPQKPDAERQTDEEKEELKKPKKEDSSPKEETDKWAVEKGKDHKEPRKGEELEEEWTPTEKVKCPPIGMESHRIEDNQIRASSMLRHGLGAQRGRLNMQTGATEDDYYDGAWCAEDDARTQWIEVDTRRTTRFTGVITQGRDSSIHDDFVTTFFVGFSNDSQTWVMYTNGYEEMTFHGNVDKDTPVLSELPEPVVARFIRIYPLTWNGSLCMRLEVLGCSVAPVYSYYAQNEVVATDDLDFRHHSYKDMRQLMKVVNEECPTITRTYSLGKSSRGLKIYAMEISDNPGEHELGEPEFRYTAGIHGNEVLGRELLLLLMQYLCREYRDGNPRVRSLVQDTRIHLVPSLNPDGYEVAAQMGSEFGNWALGLWTEEGFDIFEDFPDLNSVLWGAEERKWVPYRVPNNNLPIPERYLSPDATVSTEVRAIIAWMEKNPFVLGANLNGGERLVSYPYDMARTPTQEQLLAAAMAAARGEDEDEVSEAQETPDHAIFRWLAISFASAHLTLTEPYRGGCQAQDYTGGMGIVNGAKWNPRTGTINDFSYLHTNCLELSFYLGCDKFPHESELPREWENNKEALLTFMEQVHRGIKGVVTDEQGIPIANATISVSGINHGVKTASGGDYWRILNPGEYRVTAHAEGYTPSAKTCNVDYDIGATQCNFILARSNWKRIREIMAMNGNRPIPHIDPSRPMTPQQRRLQQRRLQHRLRLRAQMRLRRLNATTTLGPHTVPPTLPPAPATTLSTTIEPWGLIPPTTAGWEESETETYTEVVTEFGTEVEPEFGTKVEPEFETQLEPEFETQLEPEFEEEEEEEKEEEIATGQAFPFTTVETYTVNFGDF

SEQ ID NO: 2355 - DNA, 540 bp, Rattus norvegicus
  ref <308>: DATABASE ACCESSION NUMBER: Refseq / NM_017260
  ref <309>: DATABASE ENTRY DATE: 2003-01-14
actagttgtctctggggagcctgagcaagcatggatcaagaggctgtgggcaatgttgtgctcctggccatcgtcaccctcatcagcgtggtccagaacgcattcttcgcccacaaggtggagcttgaaagcaaggcgcaaagcgggagaagcttccagaggacggggactcttgccttcgagcgggtctacactgccaaccagaactgcgtagatgcgtaccccactttccttgtggtactctggactgcaggactactttgcagccaagtccccgccgccttcgctgggctgatgtatctgttcgtgaggcaaaagtactttgtcggctatctgggagagagaactcagagcacccctggctacatattcggcaagcggatcatcctattcttgttcctcatgtcccttgccggcatcctcaaccattacctcatcttcttcttcggaagcgacttcgagaactacattagaactataaccacgacgatctccccgctgcttctcatcccctgatggctggataccggagtaggacga

SEQ ID NO: 2356 - protein, 161 aa, Rattus norvegicus
  ref <308>: DATABASE ACCESSION NUMBER: Refseq / NP_058956
  ref <309>: DATABASE ENTRY DATE: 2003-01-14
MDQEAVGNVVLLAIVTLISVVQNAFFAHKVELESKAQSGRSFQRTGTLAFERVYTANQNCVDAYPTFLVVLWTAGLLCSQVPAAFAGLMYLFVRQKYFVGYLGERTQSTPGYIFGKRIILFLFLMSLAGILNHYLIFFFGSDFENYIRTITTTISPLLLIP

SEQ ID NO: 2357 - DNA, 371 bp, Rattus norvegicus
  ref <308>: DATABASE ACCESSION NUMBER: EMBL / AA891719
  ref <309>: DATABASE ENTRY DATE: 2000-03-03
atggacatgagagggatcttcctggccttcggacctgatttcaagtcgaacttcagagctgctccaatcagatctgtggatgtctacaacatcatgtgtaatgtcgtaggcatcaccccactgcccaacaatgggtcctggtccagggtggtatgcatgctgaagagtcaaaccagctcgtctccatccatcccgccgaacagttgtgcgctggtcttgattctcctcttatactttgtatagctcgccatagggctcattccaaagcactcctccaacatggagtagttttcattttccttatgaataatagctctattaacacaatcaaggccattaaagttgtaaacatattattcttggatgatcct

SEQ ID NO: 2358 - DNA, 2004 bp, Homo sapiens
  ref <308>: DATABASE ACCESSION NUMBER: EMBL / AK057370
  ref <309>: DATABASE ENTRY DATE: 2002-08-06
ggaagagagaatagctacagattctccatcctcagtctttgcaaggcgacagctgtgccagccgggctctggcaggctcctggcagcatggcagtgaagcttgggaccctcctgctggcccttgccctgggcctggcccagccagcctctgcccgccggaagctgctggtgtttctgctggatggttttcgctcagactacatcagtgatgaggcgctggagtcattgcctggtttcaaagagattgtgagcaggggagtaaaagtggattacttgactccagacttccctagtctctcgtatcccaattattataccctaatgactggccgccattgtgaagtccatcagatgatcgggaactacatgtgggaccccaccaccaacaagtcctttgacattggcgtcaacaaagacagcctaatgcctctctggtggaatggatcagaacctctgtgggtcactctgaccaaggccaaaaggaaggtctacatgtactactggccaggctgtgaggttgagattctgggtgtcagacccacctactgcctagaatataaaaatgtcccaacggatatcaattttgccaatgcagtcagcgatgctcttgactccttcaagagtggccgggccgacctggcagccatataccatgagcgcattgacgtggaaggccaccactacgggcctgcatctccgcagaggaaagatgccctcaaggctgtagacactgtcctgaagtacatgaccaagtggatccaggagcggggcctgcaggaccgcctgaacgtcattattttctcggatcacggaatgaccgacattttctggatggacaaagtgattgagctgaataagtacatcagcctgaatgacctgcagcaagtgaaggaccgcgggcctgttgtgagcctttggccggcccctgggaaacactctgagatatataacaaactgagcacagtggaacacatgactgtctacgagaaagaagccatcccaagcaggttctattacaagaaaggaaagtttgtctctcctttgactttagtggctgatgaaggctggttcataactgagaatcgagagatgcttccgttttggatgaacagcaccggcaggcgggaaggttggcagcgtggatggcacggctacgacaacgagctcatggacatgcggggcatcttcctggccttcggacctgatttcaaatccaacttcagagctgctcctatcaggtcggtggacgtctacaatgtcatgtgcaatgtggtgggcatcaccccgctgcccaacaacggatcctggtccagggtgatgtgcatgctgaagggccgcgccagcactgccccgcctgtctggcccagccactgtgccctggcactgattcttctcttcctgcttgcataactgatcatattgcttgtctcagaaaaaaacaccatcagcaaagtgggcctccaaagccagatgattttcattttatgtgtgaataatagcttcattaacacaatcaagaccatgcacattgtaaatacattattcttggataattctatacataaaagttcctacttgttaaaaaagatacaaaccttgtttttccagaaggtaggaaaatcctagctttccatttgtgcagttatatgtcattttctcccttcttttcacgttactcaggatgaactctctgagcagggacctgctcctgcagcaaccaaacttggagtggttattgcagacagacgtggctctgggcccctctctgtcccaccttgcacaaaggaccccctcagaccaggcccttgtctgtgccctgtccacacccaggagccatcctcagtgtctgtggccacaatcctgtactgttccttccatccctgataaaaggaggtctacatgaaagcaaaagctactgtctatttctgacccagctcatggaattttttcatcttatactgagctccagaaaggacgtaacttagcatggatcaccaatcaatc

SEQ ID NO: 2359 - protein, 440 aa, Homo sapiens
MAVKLGTLLLALALGLAQPASARRKLLVFLLDGFRSDYISDEALESLPGFKEIVSRGVKVDYLTPDFPSLSYPNYYTLMTGRHCEVHQMIGNYMWDPTTNKSFDIGVNKDSLMPLWWNGSEPLWVTLTKAKRKVYMYYWPGCEVEILGVRPTYCLEYKNVPTDINFANAVSDALDSFKSGRADLAAIYHERIDVEGHHYGPASPQRKDALKAVDTVLKYMTKWIQERGLQDRLNVIIFSDHGMTDIFWMDKVIELNKYISLNDLQQVKDRGPVVSLWPAPGKHSEIYNKLSTVEHMTVYEKEAIPSRFYYKKGKFVSPLTLVADEGWFITENREMLPFWMNSTGRREGWQRGWHGYDNELMDMRGIFLAFGPDFKSNFRAAPIRSVDVYNVMCNVVGITPLPNNGSWSRVMCMLKGRASTAPPVWPSHCALALILLFLLA

SEQ ID NO: 2360 - DNA, 541 bp, Rattus norvegicus
  ref <308>: DATABASE ACCESSION NUMBER: EMBL / AA892916
  ref <309>: DATABASE ENTRY DATE: 2000-03-03
cgagttgtaaaactggagaatggagaaatagagaccatcgcccggtttggttcgggcccttgcaaaacccgagatgatgaacctacctgtgggagacccctgggcatccgggtaggacccaacgggactccttttagtggtaatgcatgtgttgatgcagggattatgcaagctgaaacttgttctcaggggccatgtcagatgtgtgagaatacctggactcctggttttcctccatagtaaaggggtgttctcccactctctacaagtctcttcatgccagagggttttcaagactcccatttagtggccaggaggatttcattgggtttctttctgtgactgccttctccactgtaattgggtgacccagcgagtttggacctgcccaggggtgttttagagatgcccttttacggcctgattcctttagacccacagatgtgattagcgaactgttgatgtaatgtttgtgctaatgtaataagctccaagttgcttatttcttggcaagtatgtttatacactggtcttaattttg

SEQ ID NO: 2361 - DNA, 1997 bp, Rattus norvegicus
  ref <308>: DATABASE ACCESSION NUMBER: Refseq / NM_031594
  ref <309>: DATABASE ENTRY DATE: 2003-01-31
cgcagcgagcctgccggagctggtgggtggagctacgaccgggagccgacggtggcgaggggacccacagtgtccaaggcgcggagcggtcggcggagccatggcgggctgctgctccgtgctcgggtccttcctgttcgagtacgacacgccgcgcatcgtgctcatccgcagccgtaaagtggggctcatgaaccgcgcggtgcagctgctcatcctggcttacgtcatcgggtgggtgttcgtgtgggaaaagggctaccaggaaacggactccgtggtcagctcggtgacaaccaaagccaaaggtgtggctgtgaccaacacctctcagcttggattccggatctgggacgtggcggactatgtgattccagctcaggaggaaaactccctcttcatcatgaccaacatgatcgtcaccgtgaaccagacacagagcacctgtccagagattcctgataagaccagcatttgtaattcagacgccgactgcactcctggctccgtggacacccacagcagtggagttgcgactggaagatgtgttcctttcaatgagtctgtgaagacctgtgaggtggctgcatggtgcccggtggagaacgacgttggcgtgccaacgccggctttcttaaaggctgcagaaaacttcaccctcttggtaaagaacaacatctggtaccccaagtttaacttcagcaagaggaacatcctccccaacatcaccacgtcctacctcaaatcgtgcatttacaatgctcaaacggatcccttctgccccatattccgtcttggcacaatcgtgggggacgcgggacatagcttccaggagatggcagttgagggaggcatcatgggtatccagatcaagtgggactgcaacctggatagagccgcctccctttgcctgcccagatattccttccggcgcctggacacccgggacctggaacacaatgtgtctcctggctacaatttcaggtttgccaagtactacagggacctggccggcaaagagcagcgcacactcaccaaggcgtacggcatccgctttgacatcatcgtgtttggaaaggctgggaagtttgacatcatccctaccatgatcaacgttggctctggcttggcgctcctcggggtggcgacggtgctctgtgacgtcatagtcctctactgcatgaagaagaaatactactaccgggacaagaaatataagtatgtggaagactacgagcagggtctttcgggggagatgaaccagtgacgcctaaagttacatttccaccccgctcagcccgcgaagcagaaagatggggagagatggctactgcgtctgtcactctagagaaagctccagagtttcagctcagttctccactccacaaatactcagggttgccaagcacatcttgttggagcccggctcttgctctgctgctcagatgggcttccagatacaagaatcctcctgcttctgcctctaggaatgctgggatcaaacatgtcacttgcaatgcccatttcccatggggagtttggcattttttacattttaccctttccttttgtatacatctaaggctgccctcagacgcaagacgttcttccaccctatacacccttttaatctcactgtgtgtgggaggggggtcgtttgcacacgacgcacggtggatgtctggtgtgctgttggctgggccacctgtggcttatacagtgtgagcgtatggaggtaggaagggtctgagagcagagacactgctgtggcttacggacaggcccaggctctgtccacgcactttatttctaaggaaggaggctctctcaggtgctgtcagcaggcctgggacaccattcctcttccctataatcagagaagttgtccttgtagcaaaggcagggttagcttttccttttataagggctgtgttgaaatgacctaggaccaaacattaaaagaaataattttttaaaaaaaaaaaaaaaaaaaaaaa

SEQ ID NO: 2362 - protein, 388 aa, Rattus norvegicus
  ref <308>: DATABASE ACCESSION NUMBER: Refseq / NP_113782
  ref <309>: DATABASE ENTRY DATE: 2003-01-31
MAGCCSVLGSFLFEYDTPRIVLIRSRKVGLMNRAVQLLILAYVIGWVFVWEKGYQETDSVVSSVTTKAKGVAVTNTSQLGFRIWDVADYVIPAQEENSLFIMTNMIVTVNQTQSTCPEIPDKTSICNSDADCTPGSVDTHSSGVATGRCVPFNESVKTCEVAAWCPVENDVGVPTPAFLKAAENFTLLVKNNIWYPKFNFSKRNILPNITTSYLKSCIYNAQTDPFCPIFRLGTIVGDAGHSFQEMAVEGGIMGIQIKWDCNLDRAASLCLPRYSFRRLDTRDLEHNVSPGYNFRFAKYYRDLAGKEQRTLTKAYGIRFDIIVFGKAGKFDIIPTMINVGSGLALLGVATVLCDVIVLYCMKKKYYYRDKKYKYVEDYEQGLSGEMNQ

SEQ ID NO: 2363 - DNA, 1389 bp, Homo sapiens
  ref <308>: DATABASE ACCESSION NUMBER: Refseq / NM_002560
  ref <309>: DATABASE ENTRY DATE: 2003-02-19
gggggactgggagcgggcggcgcggccatggcgggctgctgctccgcgctggcggccttcctgttcgagtacgacacgccgcgcatcgtgctcatccgcagccgcaaagtggggctcatgaaccgcgccgtgcaactgctcatcctggcctacgtcatcgggtgggtgtttgtgtgggaaaagggctaccaggaaactgactccgtggtcagctccgttacgaccaaggtcaagggcgtggctgtgaccaacacttctaaacttggattccggatctgggatgtggcggattatgtgataccagctcaggaggaaaactccctcttcgtcatgaccaacgtgatcctcaccatgaaccagacacagggcctgtgccccgagattccagatgcgaccactgtgtgtaaatcagatgccagctgtactgccggctctgccggcacccacagcaacggagtctcaacaggcaggtgcgtagctttcaacgggtccgtcaagacgtgtgaggtggcggcctggtgcccggtggaggatgacacacacgtgccacaacctgcttttttaaaggctgcagaaaacttcactcttttggttaagaacaacatctggtatcccaaatttaatttcagcaagaggaatatccttcccaacatcaccactacttacctcaagtcgtgcatttatgatgctaaaacagatcccttctgccccatattccgtcttggcaaaatagtggagaacgcaggacacagtttccaggacatggccgtggagggaggcatcatgggcatccaggtcaactgggactgcaacctggacagagccgcctccctctgcttgcccaggtactccttccgccgcctcgatacacgggacgttgagcacaacgtatctcctggctacaatttcaggtttgccaagtactacagagacctggctggcaacgagcagcgcacgctcatcaaggcctatggcatccgcttcgacatcattgtgtttgggaaggcagggaaatttgacatcatccccactatgatcaacatcggctctggcctggcactgctaggcatggcgaccgtgctgtgtgacatcatagtcctctactgcatgaagaaaagactctactatcgggagaagaaatataaatatgtggaagattacgagcagggtcttgctagtgagctggaccagtgaggcctaccccacacctgggctctccacagccccatcaaagaacagagaggaggaggagggagaaatggccaccacatcaccccagagaaatttctggaatctgattgagtctccactccacaagcactcagggttccccagcagctcctgtgtgttgtgtgcaggatctgtttgcccactcggcccaggaggtca

SEQ ID NO: 2364 - protein, 388 aa, Homo sapiens
  ref <308>: DATABASE ACCESSION NUMBER: Refseq / NP_002551
  ref <309>: DATABASE ENTRY DATE: 2003-02-19
MAGCCSALAAFLFEYDTPRIVLIRSRKVGLMNRAVQLLILAYVIGWVFVWEKGYQETDSVVSSVTTKVKGVAVTNTSKLGFRIWDVADYVIPAQEENSLFVMTNVILTMNQTQGLCPEIPDATTVCKSDASCTAGSAGTHSNGVSTGRCVAFNGSVKTCEVAAWCPVEDDTHVPQPAFLKAAENFTLLVKNNIWYPKFNFSKRNILPNITTTYLKSCIYDAKTDPFCPIFRLGKIVENAGHSFQDMAVEGGIMGIQVNWDCNLDRAASLCLPRYSFRRLDTRDVEHNVSPGYNFRFAKYYRDLAGNEQRTLIKAYGIRFDIIVFGKAGKFDIIPTMINIGSGLALLGMATVLCDIIVLYCMKKRLYYREKKYKYVEDYEQGLASELDQ

SEQ ID NO: 2365 - DNA, 511 bp, Rattus norvegicus
  ref <308>: DATABASE ACCESSION NUMBER: EMBL / AA859983
  ref <309>: DATABASE ENTRY DATE: 2000-03-03
ccgcagttcagtccctccctgatgtcagagaagatcctgctccggctgctcaagtaccctgacgtcattcaggagctcaggttcgacgagcacaacaagcactgcacccgccactacctgtacacccggaacaagccagccgactgcttcattctcatcctgcaggggaaggtggaggtggaagcaggcaaggagaacatgaagtttgagaccggtgccttctcataccctggaactggcctggtctgcgtgtcttcccagcaggggaggactccacagacggcgtccaagtgggtaggcaagtcacagccgccatagcagatgactcctatttattttgcattaagattttaatttgtatatttttgtgatttattttggcattgttatgagtttgactctcggggagttttgttgttatgactcttgtgtcttttgtcacaaaacaatgataatatttgctaaacaatatatggaatttatttttgattggtaataaaaaatgaaatgc

SEQ ID NO: 2366 - DNA, 4561 bp, Homo sapiens
  ref <308>: DATABASE ACCESSION NUMBER: Refseq / NM_020184
  ref <309>: DATABASE ENTRY DATE: 2002-10-20
catgaggctggcgagctgcaacaagtcgtgtgggacgaacccggatggcatcatcttcgtgtccgagggcagcaccgtgaacctgaggctgtacggctacagcctgggcaacatctccagcaatctgatctccttcaccgaggtggacgatgccgagaccctccacaagtccaccagcttgcctcgagctcaccaaggacctggtcgtccagcagcttggtcaacgtgagccgcgggaacacgtccggcgtgctggtggtgctcaccaagttcctccggaggagcgagagcatgaagctgtatgcactgtgcacccgggcccagcccgacgggccctggctgaagtggacggacaaggactcactgctcttcatggtggaggagcctgggaggttcctgcctctctggctgcacattctcctaattacggtgctgctggtgctgtcgggcatattttctggcctcaacctcgggcttatggccctggaccccatggagctgcgcatcgtgcagaactgtggcaccgagaaggagaggcgctatgcccgcaagattgagcccatccggcgcaagggcaactaccttctctgctcgttgctcctagggaacgtgctggtcaacacctccctcacaatccttctagacaacctcatcgggtccggcctcatggcggtggcctcctccaccattggcattgtcatctttggggagatcctacctcaggccctgtgctcccgacatgggctggctgtgggtgccaacatcatccttctcaccaaattctttatgctactcaccttccccctcagttttcccattagcaagctcctggacttttttctgggccaggagattcgcactgtttacaaccgggagaagctgatggagatgttgaaggtgacggagccctataatgacctcgtgaaagaggagctcaatatgatccagggtgccctggaactacggaccaaaactgtagaggatatcatgacccagctccaggactgcttcatgatccgcagcgatgccatcctggacttcaacaccatgtcggagataatggaaagcggctatactcgcatcccggtgttcgaagacgagcagtccaatattgtagatattctctacgtcaaagacttggcctttgtggaccccgatgactgcacccccctcaagactatcactcgcttctataaccacccggtgcactttgtcttccatgacaccaagttggatgccatgctggaggagttcaagaaggggaagtcccacctggccatcgtgcagaaggtaaacaacgagggtgagggtgaccccttctacgaggtcctgggcctggtcaccctggaggacgtgatcgaggagatcatcaagtcggagatcctggacgagtccgacatgtacactgacaaccgaagccggaagcgggtgtctgagaagaacaagcgtgacttctctgccttcaaggatgcggacaatgagctcaaagtgaaaatctccccgcagctcctcctggccgctcatcgcttcctagccacagaggtctctcagtttagcccctccctgatatcagagaagatcctgctgcggctactcaagtacccagatgtcattcaggaactcaagtttgacgagcacaataagtactacgcccgccattacctgtacacccgaaataagccggccgactacttcatcctcatcctgcaggggaaggtggaggtggaggcagggaaggagaacatgaagtttgagacgggcgccttctcctactatgggactatggccctgacctcggtcccctccgaccgttccccagcacaccccaccccactcagccgctcagcctccctcagttacccagaccgcacagacgtctcaactgcagcaaccttggcaggcagcagcaaccagtttggcagctctgtcctgggccagtacatctctgacttcagcgtccgggcactcgtggacttgcagtacatcaagatcactcggcagcagtaccagaacgggctgctggcttctcgcatggagaacagccctcagtttcccatagacgggtgcaccacccacatggagaacttggccgagaagtctgagctgcctgtggtggacgagaccacaactcttctcaacgagcgtaactccttgctgcacaaagcctcccacgagaatgccatctgacaggagggcccggggccccctgcccaccctgcgggggcctccccagtgggcccacatgaagagagggaacctgttagtccagaaaggatacggatagatagcctgtctgactgaacagccagatggcccccagcctatgggggatctggcctctgccagggacctctgagtagctctgaggtggcactgtccagccctggatagggggggcagtgggccagctaccgtaagcaaaggctgttttttactgagagaatttctaaagtaggctcatcacttttttttaaatatcattttgggaagggaagacagggttaaggaactttatttaaaaaaaaaatatttttttcctaaaaactataaaagaggaagggtttcttgtcccgggaagcaacggacataatctgttcccagccatggccttccagcttgtgtccctgattcagggagctctcccttcctcctcctcctcctcctccggaggtgggatcccagagcctgccagtggaggcttatctgttgggaggaagacagctcttcacagaagcaaagaacaaaatggcatggagatcagctgcctgagcacctgcgctgtagcttatctgacaacgctgaggccacgagctcctgggtagctgtgatcagggacatgataatctgagctatgcagaggagcacatctgttgtcaactgctgtacccagaaatctagaactctgccgacagcctctcctggtgagtcgggactcagctgaggacacatccccaccctgcctcccatctggccctttggacaactggccctttgtgacagggctgactcaagtgttaggcagggtctcaggcctttgattgctcacccctgctccccaggccctgccctcacttttaccaaaggttctccctcggcgggagggcatctgtgttggaggtgatttgtctgggttcttccttttggttccagaaggaactgtcagtcatcagcatctgcgttgttagcagtcagtaccacccccgccccacaatgacagtcaaggctgacttgttgactgaagcctttttcccagaccccttatttcgaatccccaagcttcagtccctcttgggggtggagacaagaggacatgtgggaagccacggaagcaggttctttatgtcctctcctctgtggctggcaaggctcacctggccttatccacccacttatggaacctcaggagaggagggctcctcctaaaggcatgcagcttgcagcccctctttctcacacgtgtgatcctagcgtgagaggtcatcctgcccttgctgaagttagtagtactgtactaagagctctgccctcatgtgaattcctgccctggtgcctcttccctggggctgaatcaggccctgctgcaaaactccaggcttcccagggttggggaggctgtgggaccaaggtccatgttggtccttccactgggtgcagcaggagctgggtcccgagagcctggcaggtgaaactctgcaggccttccgcctgattattatttattcactcctttcctcaccccaagtgccctgctctccaggtgcctagagtatcctaactcttaggaccagggattgtcttgcaccaagtatgcctacccctggccagtctgaggtctcctagccatagaactgactcctggaagcctggagagaaggtggtgacacccatgggttctcaactgtaaggaaaaaagacaccagacttttgttccctagtgggggaaagcccttagtcttgtacaggagcagcttgctcccaagtccttttggaagctggcagagctatattcctgacagccctgactgccaggtagagcaaaagacattggtgggggtatgtgaagcaaaaggggcaggtgcacacacctccacagtgacctctgtgcacacggttaccaccaactggctggccctcctcctcttccctggcccattgatcatcccttctcacagagggtcatcattatttccaaatattgtttgtctgatgacttcctcttcccagtgcaatttttcccttcctatttcaacctctggttcctgggatgagccataccctggaactggcccacccactgtgtcttccacgtaagggagacctttgcaaagggcatccaaatgggtaggcaggtgacagccgccgtatttattttgcataatattttaatttgtatatttttgtgatttattttggcgttatgagtttgactctcggggagttttgttgttatgactcttgtgtcttttgtcacaaaacaatgatatttgctaaacgatatatggaatttatttttgattggtaataaaaaatcaaatatgtataaaaaaaaaaaaaaaaaaaa

SEQ ID NO: 2367 - protein, 631 aa, Homo sapiens
  ref <308>: DATABASE ACCESSION NUMBER: Refseq / NP_064569
  ref <309>: DATABASE ENTRY DATE: 2002-10-20
MKLYALCTRAQPDGPWLKWTDKDSLLFMVEEPGRFLPLWLHILLITVLLVLSGIFSGLNLGLMALDPMELRIVQNCGTEKERRYARKIEPIRRKGNYLLCSLLLGNVLVNTSLTILLDNLIGSGLMAVASSTIGIVIFGEILPQALCSRHGLAVGANIILLTKFFMLLTFPLSFPISKLLDFFLGQEIRTVYNREKLMEMLKVTEPYNDLVKEELNMIQGALELRTKTVEDIMTQLQDCFMIRSDAILDFNTMSEIMESGYTRIPVFEDEQSNIVDILYVKDLAFVDPDDCTPLKTITRFYNHPVHFVFHDTKLDAMLEEFKKGKSHLAIVQKVNNEGEGDPFYEVLGLVTLEDVIEEIIKSEILDESDMYTDNRSRKRVSEKNKRDFSAFKDADNELKVKISPQLLLAAHRFLATEVSQFSPSLISEKILLRLLKYPDVIQELKFDEHNKYYARHYLYTRNKPADYFILILQGKVEVEAGKENMKFETGAFSYYGTMALTSVPSDRSPAHPTPLSRSASLSYPDRTDVSTAATLAGSSNQFGSSVLGQYISDFSVRALVDLQYIKITRQQYQNGLLASRMENSPQFPIDGCTTHMENLAEKSELPVVDETTTLLNERNSLLHKASHENAI

SEQ ID NO: 2368 - DNA, 2469 bp, Rattus norvegicus
  ref <308>: DATABASE ACCESSION NUMBER: Refseq / NM_013064
  ref <309>: DATABASE ENTRY DATE: 2003-01-14
gtcgacgtgtcgaaaggatgctcaggatatgaatgagccagcggacgcgtgaatggaggtggatggaagcgtgaagtacaaggcggggctccagctgggtgacctcgaggcagacaggccggggctccctcccctctcctcccagcctcccactccgctcccctccccgcggcgcgcagaccttccgagccctcccgagctaccgcgggcaacagagacgggaccacgcagccaccgagcggacagcgcctcctcaggagggggctaccccgccgcgtctccagctctgccctaaggcgaagtcccgcgagcgaggtccagggctcactagtaatgacacgggacactgactggagggccggcatctgggtgtaccaggctctgggtgaagtagttcccaaatcttagagctcaatactcctcatcgtgacactgaaaggaagtttgttctgggaccataaagacctgagtgcaagaccagggcctttgaaaggagtgggctgagggcttgtgggagtttctcttcctccacagagcccaggatgctcctcagctgaagtggctcatggaaccctcagccacgcctggggcccagcccggagtccccactagcagtggggaacccttccacctgcctccagactatgaggacgagttcctccgctacctgtggcgcgattatctctatccgaagcagtacgagtgggttctcatcgcggcctacgtggccgtgtttctcatagccttggtgggcaacactctggtctgcctggctgtgtggcggaaccaccacatgaggacagtcaccaactacttcattgtcaacctgtccctggcagatgtgctggtgactgccatctgcctgcctgccagcctgttagtggacatcaccgaatcatggctcttcggccatgccttgtgcaaggtcatcccctatctccaggccgtgtcggtgtcagtggcagtgctgactctcagcttcatcgccctggaccgctggtatgccatctgccaccctctgctgttcaagagcacagctcgccgtgcccgtggctccatcctgggcatctgggctgtgtcgctggctgtcatggtgccccaggccgctgtcatggaatgcagcagtgttctgcccgagctagccaatcgcacacggctcttctctgtctgtgatgagcgctgggcagatgaactctaccctaagatctaccacagctgcttcttctttgtcacctacctggccccgctgggcctcatgggcatggcctatttccagatcttccgcaagctctggggcccccagatcccgggtaccacatcggccttggtgcggaactggaagcgaccctcagagcaactggaagctcagcaccagggcctgtgtacagagccccaaccccgggcccgagccttcctggccgaggtgaagcagatgcgagctcggaggaagactgccaagatgctgatggtggttctgctggtttttgcactctgttatctgcccatcagtgtcctcaatgtccttaaaagagtgtttgggatgtttcgccaagccagcgaccgggaagctgtctacgcctgcttcaccttctcccactggctggtgtacgccaacagtgcggccaaccctatcatctacaacttcctcagtggcaaatttcgggagcagttcaaggctgcattctcctgctgcctgcctggtctgggtcccagctcctctgccagacacaagtccttgtccttgcagagccggtgttctgtctccaaagtctctgagcatgttgtgctgaccacagtcactacagtgctgtcctgagtggggctggccaggctctgggaggcttgatcctttgcctggggctcaccccacccccacactcatggaaagactgctgctgctcagtccgatccctcaactccagtcctagctttctgcctgagtgactccgccagagtcattccctctcttgaggttgcatcccctaagctgagttgataggggcttaagcatgctcaagagagcagagagcgttgtaaaccgtctagtgcttgtggacgtggttactgtccctgtctcgtatggccctaccctacagtgtcacttcaccctatcagagcttggctttctccccaaagacctgtctcctactcaattataggccctccctggctggagtccactccaagggtccccacaggcatatccacctggcctgaaggccaccagaagtccggactgcacatggccagctgcaccaatgtgtccctgtgaactaatttgcgttcagcccttctcagtgagctctgaagctaggtccaccctctccaggtgtggactgcacacagcacaggctggatctcgttggcattgtggagtgcttaaacactctccatgcggccgttcggcatggaggccaacagcccgtggcaactgtaattaaaagcctggtaccgaaaaaaaaagtcgac

SEQ ID NO: 2369 - protein, 416 aa, Rattus norvegicus
  ref <308>: DATABASE ACCESSION NUMBER: Refseq / NP_037196
  ref <309>: DATABASE ENTRY DATE: 2003-01-14
MEPSATPGAQPGVPTSSGEPFHLPPDYEDEFLRYLWRDYLYPKQYEWVLIAAYVAVFLIALVGNTLVCLAVWRNHHMRTVTNYFIVNLSLADVLVTAICLPASLLVDITESWLFGHALCKVIPYLQAVSVSVAVLTLSFIALDRWYAICHPLLFKSTARRARGSILGIWAVSLAVMVPQAAVMECSSVLPELANRTRLFSVCDERWADELYPKIYHSCFFFVTYLAPLGLMGMAYFQIFRKLWGPQIPGTTSALVRNWKRPSEQLEAQHQGLCTEPQPRARAFLAEVKQMRARRKTAKMLMVVLLVFALCYLPISVLNVLKRVFGMFRQASDREAVYACFTFSHWLVYANSAANPIIYNFLSGKFREQFKAAFSCCLPGLGPSSSARHKSLSLQSRCSVSKVSEHVVLTTVTTVLS

SEQ ID NO: 2370 - DNA, 1564 bp, Homo sapiens
  ref <308>: DATABASE ACCESSION NUMBER: Refseq / NM_001525
  ref <309>: DATABASE ENTRY DATE: 2000-10-31
cctcccttcaggaagtttgaggctgagacccgaaaagacctgggtgcaagcctccaggcaccctgaagggagtgggctgagggctggcccaagctccctcctctccctctgtagagcctaggatgcccctctgctgcagcggctcctgagctcatggagccctcagccaccccaggggcccagatgggggtcccccctggcagcagagagccgtcccctgtgcctccagactatgaagatgagtttctccgctatctgtggcgtgattatctgtacccaaaacagtatgagtgggtcctcatcgcagcctatgtggctgtgttcgtcgtggccctggtgggcaacacgctggtctgcctggccgtgtggcggaaccaccacatgaggacagtcaccaactacttcattgtcaacctgtccctggctgacgttctggtgactgctatctgcctgccggccagcctgctggtggacatcactgagtcctggctgttcggccatgccctctgcaaggtcatcccctatctacaggctgtgtccgtgtcagtggcagtgctaactctcagcttcatcgccctggaccgctggtatgccatctgccacccactattgttcaagagcacagcccggcgggcccgtggctccatcctgggcatctgggctgtgtcgctggccatcatggtgccccaggctgcagtcatggaatgcagcagtgtgctgcctgagctagccaaccgcacacggctcttctcagtctgtgatgaacgctgggcagatgacctctatcccaagatctaccacagttgcttctttattgtcacctacctggccccactgggcctcatggccatggcctatttccagatattccgcaagctctggggccgccagatccccggcaccacctcagcactggtgcggaactggaagcgcccctcagaccagctgggggacctggagcagggcctgagtggagagccccagccccggggccgcgccttcctggctgaagtgaagcagatgcgtgcacggaggaagacagccaagatgctgatggtggtgctgctggtcttcgccctctgctacctgcccatcagcgtcctcaatgtccttaagagggtgttcgggatgttccgccaagccagtgaccgcgaagctgtctacgcctgcttcaccttctcccactggctggtgtacgccaacagcgctgccaaccccatcatctacaacttcctcagtggcaaattccgggagcagtttaaggctgccttctcctgctgcctgcctggcctgggtccctgcggctctctgaaggcccctagtccccgctcctctgccagccacaagtccttgtccttgcagagccgatgctccatctccaaaatctctgagcatgtggtgctcaccagcgtcaccacagtgctgccctgagcgagggctgccctggaggctccggctcgggggatctgcccctacccctcatggaaagacagctggatgtggtgaaaggctgtggcttcagtcctgggtttctgcctgtgtgactctggataagtcacttcct

SEQ ID NO: 2371 - protein, 425 aa, Homo sapiens
  ref <308>: DATABASE ACCESSION NUMBER: Refseq / NP_001516
  ref <309>: DATABASE ENTRY DATE: 2000-10-31
MEPSATPGAQMGVPPGSREPSPVPPDYEDEFLRYLWRDYLYPKQYEWVLIAAYVAVFVVALVGNTLVCLAVWRNHHMRTVTNYFIVNLSLADVLVTAICLPASLLVDITESWLFGHALCKVIPYLQAVSVSVAVLTLSFIALDRWYAICHPLLFKSTARRARGSILGIWAVSLAIMVPQAAVMECSSVLPELANRTRLFSVCDERWADDLYPKIYHSCFFIVTYLAPLGLMAMAYFQIFRKLWGRQIPGTTSALVRNWKRPSDQLGDLEQGLSGEPQPRGRAFLAEVKQMRARRKTAKMLMVVLLVFALCYLPISVLNVLKRVFGMFRQASDREAVYACFTFSHWLVYANSAANPIIYNFLSGKFREQFKAAFSCCLPGLGPCGSLKAPSPRSSASHKSLSLQSRCSISKISEHVVLTSVTTVLP

SEQ ID NO: 2372 - DNA, 504 bp, Rattus norvegicus
  misc_feature (1)..(504): n=a, c, g or t
  ref <308>: DATABASE ACCESSION NUMBER: EMBL / AA859667
  ref <309>: DATABASE ENTRY DATE: 2000-03-03
cggacgcgggtccggaacaatagcccgggtgtcccgaactcctggagcgagactccgcccgtccggctttgggtccggcactggagagagggttgctccgtgggcacaaggcatgatgcatcactgccactctggccacaagggctacgttgcgagcggtgcagccgagaggccagaacatcgtgccggccggggcgctggggctgcgcgccctggggttgcggcaccggagctcctgaagaccctcagccgctggggaccgaattcgggcgcgagcagagctgagttgtggggacctagcctctccgcgccgatgagtccctagctagtctttctatggcttangagccacaaacttttgcggactcgcgcggccctagcagttcggctcccgccgcgttacttgtttaaggtggcgcgggtactgccggccccaacccggctgcggaccgcgcttttgtcttggctatcccgcatgggcgcggacctccctcgtgccgaatt

SEQ ID NO: 2373 - DNA, 3538 bp, Rattus norvegicus
  ref <308>: DATABASE ACCESSION NUMBER: Refseq / NM_012669
  ref <309>: DATABASE ENTRY DATE: 2003-03-09
ggtgcccacagggcttgactagtgggatttgggggagcagtgggtgcagcgagcctggtccgttgactgccagcagtagacaccggccgtgtgtgggggaggcggctagctcagtggccttgggccgcgtggcctggcggtagaggagccatggtttctaagttgagccagctgcagacggagctcctggctgctctgctcgagtcgggcctgagcaaagaggctctgatccaggctctgggggagcccgggccctacctgatggttggagatggtcccctggacaagggggagtcctgcggtgggactcgaggggacctgaccgagctgcccaatggcctgggggagacgcgtggctcggaagatgacacggatgacgatggggaagacttcgcgccacccattctgaaagagctggagaacctcagcccagaggaggcagcccaccagaaagccgtggtggagtcacttcttcaggaggacccatggcgcgtggcaaagatggtcaagtcgtacctgcagcaacacaacatcccccagcgggaggtggtggacactacgggtctcaaccagtcccacctgtcccagcacctcaacaagggcacccccatgaagacgcagaagcgggccgcgctgtacacctggtacgtccgcaagcagcgagaggtggctcagcaattcacccacgcggggcagggcggactgattgaagagcccacaggtgatgagctgccaaccaaaaaggggcggaggaaccggttcaagtggggccccgcatcccagcagatcctgttccaggcttacgagaggcagaagaaccccagcaaggaagagcgagagaccttggtggaggagtgcaatagggcggagtgcatccagagaggggtgtcaccatcgcaggcccaggggctaggctccaaccttgtcaccgaggtgcgtgtctacaactggtttgccaaccggcgcaaggaagaagcctttcggcataagctggccatggacacgtataacgggcctccacccgggccaggccccggccctgcgctacctgcccacagttccccgggcctgcccacaaccaccctctctcccagtaaggtccacggtgtgcggtatggacagtctgcaaccagcgaggcagctgaggtgccctccagcagcggaggtcccttagtcacagtgtctgcggccttacaccaagtgtcccccacaggcttggagcccagcagcctgctgagcaccgaggccaagctggtctcagccacggggggtcccctgcctcccgtcagcaccctgacagcactgcacagcttggagcagacgtctccaggtctcaaccagcagccgcagaaccttatcatggcctcgctgcctggggtcatgaccatcggcccaggggagcccgcctccctgggtcccacgttcactaacacgggtgcctctaccctggtcattggtctggcctccacacaggcacagagcgtgccagtcatcaacagcatggggagcagcctgaccaccctgcagccggtccagttttcccagccactgcacccttcctatcagcagcctctcatgccccctgtacagagccacgtggcccagagtcccttcatggcaaccatggcccagctgcagagcccccacgccctgtacagccacaagcctgaggtggcccagtacacgcatacaagcctgcttccgcagaccatgctgatcacagacaccaacctcagcacccttgccagcctcacgcccaccaagcaggtcttcacctcagacacagaggcctccagtgagcctgggcttcatgagccgtcgtctccagccacaaccattcacatccccagccaggacccgtcaaacatccagcacctgcagcctgctcaccggctcagcaccagtcccacagtgtcctccagcagcctggtgttgtaccagagttctgactccaacgggcacagccacctgctgccatccaaccacggtgtcatcgagacttttatctccacccagatggcctcctcctcccagtaaccatggtgactgcctcccaggagctgggctcccagagcctgcacagggggagaggagggccacagccatgctgcctggagggtgttggagcctgccacctgccacaggctgctggccttcccagaactctatgccttcatgctgcagctgctcctccatcatcagaaagggatggctctgaggtgtctcctcagcctgaggggcaagcctcaaggagccggaggacagcccaatctggaccgccatccctgctggttagaatagaaaacttaatgcttggaacagaagggggaagcctgtattgctggcaccctccagtcagagcttgcaggccctgaaggatctctgctgagctcggaggccctacatcaacatggctgccatctgtctcctgtgcctcccaggccactccaccctgcgccagagacccatgtgcctcttggtgggttaccctccctccacaggatcttccaggcagttctctggctaggcttgggagcctagggagcagggctctcctaggctttcccctactaagtcgctcttcctcccggccccaggacctcatttgtttccgtgaccgtatcttctgatgccagcttggcatcttgcctgcactagaaaggctgcttcagggctaagattgtcacccttgttccttagggcacgtaactcatgccaaggtcacatcctaggcaatcacctcctctggctgcagggccctacaacttccttcctggtgtgagagacgtgtagaactcggaagacaaggcctgagcaatgtctagtggagagagtgctgagaccagcagagagaagccacccaaggggctaggggctggcagctattctgatctctggcctgctgcagagagcctggccctcagtgggctcccccctcagcctggaaagagccagcgccccctgcagcctacggccggtcatgggcaagcctagatgtttatttaacttttagtaaagccagtaagaagtgtgtagtagcttcctgattacctaggcatctgtggccaggagggacggtggagggaaggcagagggaagcagggtgaaggcaggggcctgagctgtcggcaggctcatgggatatgtgtttacacatctttttgttcaactggaaatgaggtgaggtgactgcctggatttctgtgtcctcctcggtactgcaagaaacccacccagtccaggtgtggtgccattcccagagtcttaagctggggtgacaaagcgtatccggggtgtgggtggaaggatcccactgtggttttatgagacgtccccctaacattgagcacagaggatgtgcctcggtggcacaatgcctgcctggtaagtgtaaagccacgggtttgatccccggcactcaaacaacaacgcactgacagctccttgtaactacgcaggaggcaaaccaggagactggccaggttgagctacagagacacagacaaacaataaacaaaaagggttggtactgaccagg

SEQ ID NO: 2374 - protein, 628 aa, Rattus norvegicus
  ref <308>: DATABASE ACCESSION NUMBER: Refseq / NP_036801
  ref <309>: DATABASE ENTRY DATE: 2003-03-09
MVSKLSQLQTELLAALLESGLSKEALIQALGEPGPYLMVGDGPLDKGESCGGTRGDLTELPNGLGETRGSEDDTDDDGEDFAPPILKELENLSPEEAAHQKAVVESLLQEDPWRVAKMVKSYLQQHNIPQREVVDTTGLNQSHLSQHLNKGTPMKTQKRAALYTWYVRKQREVAQQFTHAGQGGLIEEPTGDELPTKKGRRNRFKWGPASQQILFQAYERQKNPSKEERETLVEECNRAECIQRGVSPSQAQGLGSNLVTEVRVYNWFANRRKEEAFRHKLAMDTYNGPPPGPGPGPALPAHSSPGLPTTTLSPSKVHGVRYGQSATSEAAEVPSSSGGPLVTVSAALHQVSPTGLEPSSLLSTEAKLVSATGGPLPPVSTLTALHSLEQTSPGLNQQPQNLIMASLPGVMTIGPGEPASLGPTFTNTGASTLVIGLASTQAQSVPVINSMGSSLTTLQPVQFSQPLHPSYQQPLMPPVQSHVAQSPFMATMAQLQSPHALYSHKPEVAQYTHTSLLPQTMLITDTNLSTLASLTPTKQVFTSDTEASSEPGLHEPSSPATTIHIPSQDPSNIQHLQPAHRLSTSPTVSSSSLVLYQSSDSNGHSHLLPSNHGVIETFISTQMASSSQ

SEQ ID NO: 2375 - DNA, 3135 bp, Rattus norvegicus
  ref <308>: DATABASE ACCESSION NUMBER: Refseq / NM_033299
  ref <309>: DATABASE ENTRY DATE: 2001-08-15
gagggtgtaggctccttgctgagttctgctccctctgcttccgaacccgcccggacgtagtgccgctgaggtccggagccccggaacgcggggacgttgtcaggctggagctgctcgggccttctgactcagccgctctcatccagatttcaggatttctcttctgggagggagggtaacttcctcattcgccgggaccctgcttccagtcagtctggcctgactttagcgctgctgtcaccaggctcctcccttggacttaacctcgccccagttcgaggccatcccatcttggctaggatgactgtaacccagacggacctctttccctatggggactacctgaactccagccagttgcacatggagccagatgtggttgacactctgaaggaaggagaggatccagctgatcgaatgcatcccttcctggccatctatgaccttcagcctttgagagcacaccccttggtgtttgctcctggggtccctgttatagcccaggtggtaggcaccgaaagatacaccagcggatccaaggtgggaacctgtactctttattctgttcgattgacccatggcgactttacctggacaaccaagaagaaattccgacactttcaggagctgcatcgggacctccagagacacaaagtcttgatgagtctgctaaatctggctcgctttgctgcggcccattctccagcccgagaggcagccaatgagaatattccctccctaccccgaggaggttccgagggctctgccagacacacagccagcaagcagaagtacctggaaaattacctcaaccgcctcctgaccatgtctttctatcgaaattaccatgccatgacagaatttctggaagtcagtcaactttcctttatcccagaccttggctccaaaggactggaaggggtgatccggaagcgctcaggtgggcatcgagttcctggcttcacctgctgtggtcgagaccaagtttgttatcgatggtccaagaggtggctggtggtgaaggactccttcctgctgtacatgcgtccagagactggcgccatctcatttgttcaactttttgaccctggctttgaggtccaggtggggaaaaggagcacagaggcacggtatggggtgaggatcgacacctcccacaggtccctgatcctcaaatgcagcagctaccggcaggcacggtggtggggccaggagatcacggagctggcacagggtccgggcagagattttctacagctacaccagcatgacagctatgccccaccccggcctggcaccctggcccggtggtttgtgaatggggcaggttactttgctgctgtggcagatgccatcctccgagctcgagaggagattttcatcacagactggtggctgagtcctgagatttacctgaagcgtccagcccactcagatgactggagactggacattatgctcaagaggaaggcggaagaaggtgtccgtgtttccatcctgctgtttaaggaagtggaactggccttgggcatcaacagtggctatagcaagaggacgctgatgctgctgcatcccaacataaaggtgatgcgacacccagaccttgtgacactgtgggctcatcacgagaagctcctggtggtagaccaagcggtggcattcttgggtgggctggaccttgcctatggccgctgggatgatgtgcagtaccgactgactgacctgggggacccctccgaatctgcagattcacagactcccacgccaggttcagatcctgcagccactccagacctctcgcataatcacttcttctggctgggaaaagactacagcaacctcattaccaaggactgggtacagctggaccggccttttgaagatttcatcgacagggagaccacacccagaatgccatggagggatgttggagtggttgtacatggagtagctgcccgggaccttgcccgccacttcatccagcgctggaacttcaccaagaccatcaaggccagatacaagatacctcagtacccctacctgctgcctaagtccgccagcactgcaaaccatcttcccttcataatcccaggtgggcagtgcgccactgtgcaggtcttgcggtctgtggatcgatggtcagcagggactttggagagctccatcctcaatgcctacctacataccatccgagagagccagcactttctctacattgagaatcagttcttcatcagctgctcagatgggcgtacagttctgaacaaggtgggcgatgagattgtggacaggatcctaaaggctcatgaacaggggcagtgtttccgagtctacgtgcttctgcctttgctccctggctttgagggggacatctccacagggggtggcaactccatccaggccattctgcacttcacctacaggaccctgtgtcgtggggaatattcaatcttacatcgtctcaaagcagccatggggacagcatggcgggattacatgtccatctgtgggcttcgcacacatggagagctgggcgggcacccgatctccgagctcatctatatccacagcaagttgctcattgcagatgacagaacagtcatcatcggctctgcaaacatcaacgacaggagcttgctggggaagcgcgacagtgagctagccatactgatcaaggacacagaaatggagccatccctcatggatggggtggagtaccaggcaggcagatttgccctgagtttgcggggaagatgcttcagtgtgattcttggggcaaatacctggccagacctggatctccgagaccctgtctgtgatgacttcttccagctgtggcaagaaacagcggagaacaatgccaccatctatgagcagatcttccgctgcctgccgtccaatgctactcgttctctgcgggctctccgggagtacgtggctgtggagtccttggctacagtcagcccttctttggctcagtctgagcttgcccacatccggggccacttagttcacttccccctcaagtttctggaggatgagtccttgttgcctcactggggagcaaagagggggatgatacctttagaagtgtggacatagctggggcttcgctcagcggcagttgctagccgt

SEQ ID NO: 2376 - protein, 933 aa, Rattus norvegicus
  ref <308>: DATABASE ACCESSION NUMBER: Refseq / NP_150641
  ref <309>: DATABASE ENTRY DATE: 2001-08-15
MTVTQTDLFPYGDYLNSSQLHMEPDVVDTLKEGEDPADRMHPFLAIYDLQPLRAHPLVFAPGVPVIAQVVGTERYTSGSKVGTCTLYSVRLTHGDFTWTTKKKFRHFQELHRDLQRHKVLMSLLNLARFAAAHSPAREAANENIPSLPRGGSEGSARHTASKQKYLENYLNRLLTMSFYRNYHAMTEFLEVSQLSFIPDLGSKGLEGVIRKRSGGHRVPGFTCCGRDQVCYRWSKRWLVVKDSFLLYMRPETGAISFVQLFDPGFEVQVGKRSTEARYGVRIDTSHRSLILKCSSYRQARWWGQEITELAQGPGRDFLQLHQHDSYAPPRPGTLARWFVNGAGYFAAVADAILRAREEIFITDWWLSPEIYLKRPAHSDDWRLDIMLKRKAEEGVRVSILLFKEVELALGINSGYSKRTLMLLHPNIKVMRHPDLVTLWAHHEKLLVVDQAVAFLGGLDLAYGRWDDVQYRLTDLGDPSESADSQTPTPGSDPAATPDLSHNHFFWLGKDYSNLITKDWVQLDRPFEDFIDRETTPRMPWRDVGVVVHGVAARDLARHFIQRWNFTKTIKARYKIPQYPYLLPKSASTANHLPFIIPGGQCATVQVLRSVDRWSAGTLESSILNAYLHTIRESQHFLYIENQFFISCSDGRTVLNKVGDEIVDRILKAHEQGQCFRVYVLLPLLPGFEGDISTGGGNSIQAILHFTYRTLCRGEYSILHRLKAAMGTAWRDYMSICGLRTHGELGGHPISELIYIHSKLLIADDRTVIIGSANINDRSLLGKRDSELAILIKDTEMEPSLMDGVEYQAGRFALSLRGRCFSVILGANTWPDLDLRDPVCDDFFQLWQETAENNATIYEQIFRCLPSNATRSLRALREYVAVESLATVSPSLAQSELAHIRGHLVHFPLKFLEDESLLPHWGAKRGMIPLEVWT

SEQ ID NO: 2377 - DNA, 3475 bp, Homo sapiens
  ref <308>: DATABASE ACCESSION NUMBER: Refseq / NM_002663
  ref <309>: DATABASE ENTRY DATE: 2002-11-05
ctcggccggggcgtgggctccggctgcagctccggtctgctctcttggctcgggaacccccgcgggcgctggctccgtctgccagggatgacggcgacccctgagagcctcttccccactggggacgaactggactccagccagctccagatggagtccgatgaggtggacaccctgaaggagggagaggacccagccgaccggatgcacccgtttctggccatctatgagcttcagtctctgaaagtgcaccccttggtgttcgcacctggggtccctgtcacagcccaggtggtgggcaccgaaagatataccagcggatccaaggtgggaacctgcactctgtattctgtccgcttgactcacggcgacttttcctggacaaccaagaagaaataccgtcattttcaggagctgcatcgggacctcctgagacacaaagtcttgatgagtctgctccctctggctcgatttgccgttgcctattctccagcccgagatgcaggcaacagagagatgccctctctaccccgggcaggtcctgagggctccaccagacatgcagccagcaaacagaaatacctggagaattacctcaactgtctcttgaccatgtctttctatcgcaactaccatgccatgacagagttcctggaagtcagtcagctgtcctttatcccggacttgggccgcaaaggactggaggggatgatccggaagcgctcaggtggccaccgtgttcctggcctcacctgctgtggccgagaccaagtttgttatcgctggtccaagaggtggctggtggtgaaggactccttcctgctgtacatgtgcctcgagacaggtgccatctcatttgttcagctctttgaccctggctttgaggtgcaagtggggaaaaggagcacggaggcacggcacggcgtgcggatcgatacctcccacaggtccttgattctcaagtgcagcagctaccggcaggcacggtggtgggcccaagagatcactgagctggcacagggcccaggcagagacttcctacagctgcaccggcatgacagctacgccccaccccggcctgggaccttggcccggtggtttgtgaatggggcaggttactttgctgctgtggcagatgccatccttcgagctcaagaggagattttcatcacagactggtggttgagtcctgaggtttacctgaagcgtccggcccattcagatgactggagactggacattatgctcaagaggaaggcggaggaaggtgtccgtgtgtctattctgctgtttaaagaagtggaattggccttgggcatcaacagtggctatagcaagagggcgctgatgctgctgcaccccaacataaaggtgatgcgtcacccagaccaagtgacgttgtgggcccatcatgagaagctcctggtggtggaccaagtggtagcattcctggggggactggaccttgcctatggccgctgggatgacctgcactaccgactgactgaccttggagactcctctgaatcagctgcctcccagcctcccaccccgcgcccagactcaccagccaccccagacctctctcacaaccaattcttctggctgggcaaggactacagcaatcttatcaccaaggactgggtgcagctggaccggcctttcgaagatttcattgacagggagacgacccctcggatgccatggcgggacgttggggtggtcgtccatggcctaccggcccgggaccttgcccggcacttcatccagcgctggaacttcaccaagaccaccaaggccaagtacaagactcccatatacccctacctgcttcccaagtctaccagcacggccaatcagctccccttcacacttccaggagggcagtgcaccaccgtacaggtcttgcgatcagtggaccgctggtcagcagggactctggagaactccatcctcaatgcctacctgcacaccatcagggagagccagcacttcctctacattgagaatcagttcttcattagctgctcagatgggcggacggttctgaacaaggtgggcgatgagattgtggacagaatcctgaaggcccacaaacaggggtggtgttaccgagtctacgtgcttttgcccttactccctggcttcgagggtgacatctccacgggcggtggcaactccatccaggccattctgcactttacttacaggaccctgtgtcgtggggagtattcaatcctgcatcgccttaaagcagccatggggacagcatggcgggactatatttccatctgcgggcttcgtacacacggagagctgggcgggcaccccgtctcggagctcatctacatccacagcaaggtgctcatcgcagatgaccggacagtcatcattggttctgcaaacatcaatgaccggagcttgctggggaagcgggacagtgagctggccgtgctgatcgaggacacagagacggaaccatccctcatgaatggggcagagtatcaggcgggcaggtttgccttgagtctgcggaagcactgcttcggtgtgattcttggagcaaatacccggccagacttggatctccgagaccccatctgtgatgacttcttccagttgtggcaagacatggctgagagcaacgccaatatctatgagcagatcttccgctgcctgccatccaatgccacgcgttccctgcggactctccgggagtacgtggccgtggagcccttggccacggtcagtccccccttggctcggtctgagctcacccaggtccagggccacctggtccacttccccctcaagttcctagaggatgagtctttgctgcccccgctgggtagcaaggagggcatgatccccctagaagtgtggacatagttgaggcccccgtcagggagaggtcaccagctgctgtgccccaccacgtctggctccctgccccttaaccccaaggactgagggcagtgccctttgagatctggggaggcaggcattcctgaagggaactagaggtgttacagaggacccttacgtgagaaatagctgaaaagggcactcccaaccctgggctggggaggaggagagagtcccagagctcatcccccctgctgcccagtgcaaaccacttctccatgctgcaaaggagaagcacagctcctgccagggtgagcagggtcaagcctcttattccaggagaagggggctctgccccaggccctactacccattgttcccttcctcttcctgcccttgaaccccctccctgtcccagggccctcccagcccattgctgccaaggtggagggaaggataaagccacttctggcttcagcccccaccaggggaaggaaggagggcacattaactccctccaccagcctgctgacagacactaactttgtatccgttcaataagcatttcataaataaaggtgtagaaaaggttaaaaaaaaaaaaaaaaaa

SEQ ID NO: 2378 - protein, 933 aa, Homo sapiens
  ref <308>: DATABASE ACCESSION NUMBER: Refseq / NP_002654
  ref <309>: DATABASE ENTRY DATE: 2002-11-05
MTATPESLFPTGDELDSSQLQMESDEVDTLKEGEDPADRMHPFLAIYELQSLKVHPLVFAPGVPVTAQVVGTERYTSGSKVGTCTLYSVRLTHGDFSWTTKKKYRHFQELHRDLLRHKVLMSLLPLARFAVAYSPARDAGNREMPSLPRAGPEGSTRHAASKQKYLENYLNCLLTMSFYRNYHAMTEFLEVSQLSFIPDLGRKGLEGMIRKRSGGHRVPGLTCCGRDQVCYRWSKRWLVVKDSFLLYMCLETGAISFVQLFDPGFEVQVGKRSTEARHGVRIDTSHRSLILKCSSYRQARWWAQEITELAQGPGRDFLQLHRHDSYAPPRPGTLARWFVNGAGYFAAVADAILRAQEEIFITDWWLSPEVYLKRPAHSDDWRLDIMLKRKAEEGVRVSILLFKEVELALGINSGYSKRALMLLHPNIKVMRHPDQVTLWAHHEKLLVVDQVVAFLGGLDLAYGRWDDLHYRLTDLGDSSESAASQPPTPRPDSPATPDLSHNQFFWLGKDYSNLITKDWVQLDRPFEDFIDRETTPRMPWRDVGVVVHGLPARDLARHFIQRWNFTKTTKAKYKTPIYPYLLPKSTSTANQLPFTLPGGQCTTVQVLRSVDRWSAGTLENSILNAYLHTIRESQHFLYIENQFFISCSDGRTVLNKVGDEIVDRILKAHKQGWCYRVYVLLPLLPGFEGDISTGGGNSIQAILHFTYRTLCRGEYSILHRLKAAMGTAWRDYISICGLRTHGELGGHPVSELIYIHSKVLIADDRTVIIGSANINDRSLLGKRDSELAVLIEDTETEPSLMNGAEYQAGRFALSLRKHCFGVILGANTRPDLDLRDPICDDFFQLWQDMAESNANIYEQIFRCLPSNATRSLRTLREYVAVEPLATVSPPLARSELTQVQGHLVHFPLKFLEDESLLPPLGSKEGMIPLEVWT

SEQ ID NO: 2379 - DNA, 2073 bp, Rattus norvegicus
  ref <308>: DATABASE ACCESSION NUMBER: Refseq / NM_024351
  ref <309>: DATABASE ENTRY DATE: 2003-01-13
gtctctgtgtggtctcgtcatcagcacagctgggcctacacgcaagcaaccatgtctaagggacctgcggttggcattgatcttggcaccacctactcctgtgtgggtgtcttccagcatggaaaggtggaaataattgccaatgaccagggtaaccgcaccacgccgagctatgttgctttcaccgacacagaacgattaattggggatgcggccaagaatcaggttgcaatgaaccccaccaacacagtttttgatgccaaacgtctgatcggacgtaggttcgatgatgctgttgttcagtctgacatgaagcactggcccttcatggtggtgaacgatgcaggcaggcccaaggtccaagtcgaatacaaaggggagacaaaaagtttctatcctgaggaagtgtcttcaatggttctgacaaaaatgaaggaaattgcagaagcttaccttggaaagactgttaccaatgccgtggtcaccgtgccagcttacttcaatgactctcagcgacaggcaacaaaagatgctggaactattgctggcctcaacgtacttcgaattatcaatgagccaactgctgctgctattgcctatggcttagataagaaggtcggggctgaaaggaatgtgctcatttttgacttgggaggtggcacttttgatgtgtcaatcctcactatcgaggatggaatttttgaagtcaaatcaacagctggagacacccacttgggcggagaagactttgacaaccgaatggtcaaccatttcattgctgagtttaagcgaaagcacaagaaggacatcagtgagaacaagagagctgtcaggcgtctccgcactgcctgtgagcgggccaagcgcaccctctcctccagcacccaagccagtattgagattgattctctctatgagggaattgacttctacacctccattacccgtgctcgatttgaggagttgaatgctgacctgttccgtggcacactggaccctgtagagaaggcccttcgagatgccaaactagacaagtcacagatccatgatattgtcctggtgggtggttctaccagaatccccaagatccagaaacttctgcaagacttcttcaatggaaaagagctgaataagagcattaaccccgatgaagctgttgcctatggtgcagctgtccaggcagccattctatctggagacaagtctgagaatgttcaggatttgctgctcttggatgtcactcctctttcccttgggattgaaactgctggtggagtcatgactgtcctcatcaagcgcaataccaccattcccaccaagcagacccagactttcaccacctactctgacaaccagccaggtgtactcatccaggtgtatgaaggtgaaagggccatgaccaaggacaacaacctgcttgggaagtttgagctcacaggcatacctccagcaccccgtggggttcctcagattgaggttacttttgacattgatgccaatggcatcctcaatgtttctgctgtagataagagcacaggaaaggagaacaagatcaccatcaccaatgacaagggccgcttgagtaaggaggatattgagcgcatggtccaagaagctgagaagtacaaagctgaggatgagaagcagagagataaggtttcctctaagaactcgctggagtcttatgctttcaacatgaaagcaactgttgaggatgagaaacttcaaggcaagatcaatgatgaagacaaacagaagattcttgacaagtgcaacgaaatcatcagctggctggataagaaccagactgcggagaaggaagaatttgagcatcagcagaaagaactggagaaggtctgcaaccctatcatcaccaagctgtaccagagtgctggtggcatgcctggaggaatgcctggtggcttccctggtggaggagctcctccatctggtggtgcttcttcaggccccaccattgaagaggtcgattaagtcaaagtagagggtatagcattgttccacagggacccaaaacaagtaacatggaataataaaactatttaaattggcacc

SEQ ID NO: 2380 - protein, 646 aa, Rattus norvegicus
  ref <308>: DATABASE ACCESSION NUMBER: Refseq / NP_077327
  ref <309>: DATABASE ENTRY DATE: 2003-01-13
MSKGPAVGIDLGTTYSCVGVFQHGKVEIIANDQGNRTTPSYVAFTDTERLIGDAAKNQVAMNPTNTVFDAKRLIGRRFDDAVVQSDMKHWPFMVVNDAGRPKVQVEYKGETKSFYPEEVSSMVLTKMKEIAEAYLGKTVTNAVVTVPAYFNDSQRQATKDAGTIAGLNVLRIINEPTAAAIAYGLDKKVGAERNVLIFDLGGGTFDVSILTIEDGIFEVKSTAGDTHLGGEDFDNRMVNHFIAEFKRKHKKDISENKRAVRRLRTACERAKRTLSSSTQASIEIDSLYEGIDFYTSITRARFEELNADLFRGTLDPVEKALRDAKLDKSQIHDIVLVGGSTRIPKIQKLLQDFFNGKELNKSINPDEAVAYGAAVQAAILSGDKSENVQDLLLLDVTPLSLGIETAGGVMTVLIKRNTTIPTKQTQTFTTYSDNQPGVLIQVYEGERAMTKDNNLLGKFELTGIPPAPRGVPQIEVTFDIDANGILNVSAVDKSTGKENKITITNDKGRLSKEDIERMVQEAEKYKAEDEKQRDKVSSKNSLESYAFNMKATVEDEKLQGKINDEDKQKILDKCNEIISWLDKNQTAEKEEFEHQQKELEKVCNPIITKLYQSAGGMPGGMPGGFPGGGAPPSGGASSGPTIEEVD

SEQ ID NO: 2381 - DNA, 2821 bp, Homo sapiens
  ref <308>: DATABASE ACCESSION NUMBER: Refseq / NM_021252
  ref <309>: DATABASE ENTRY DATE: 2002-12-23
cccacgcgtccggagaggcgcacccgggcggccagctgggctcggagcggaacggggtcaggatggacgaggacgtgctaaccaccctgaagatcctcatcatcggcgagagtggggtgggcaagtccagcctgctcttgaggttcacagatgatacgtttgatccagaacttgcagcaacaataggtgttgactttaaggtgaaaacaatttcagtggatggaaataaggctaaacttgcaatatgggatactgctggtcaagagaggtttagaacattaactcccagctattatagaggtgcacagggtgttatattagtttatgatgtcacaagaagagatacatttgttaaactggataattggttaaatgaattggaaacatactgtacaagaaatgacatagtaaacatgctagttggaaataaaatcgataaggaaaatcgtgaagtcgatagaaatgaaggcctgaaatttgcacgaaagcattccatgttatttatagaggcaagtgcaaaaacctgtgatggtgtacaatgtgcctttgaagaacttgttgaaaagatcattcagacccctggactgtgggaaagtgagaaccagaataaaggagtcaaactgtcacacagggaagaaggccaaggaggaggagcctgtggtggttattgctctgtgttataaactctgggaaattccatctcttgcatatttgatcagatagtgacatctttctgtatataaactctttaactgctattttagggaccttgcagtttgcacataattgttttatatcatagcagtaaatatttgcaagaaatcccactcatcgaccccgggtaaaatgttatggtaagcatgcacagtttgcagtctacagtttttttatgtagcacaaaataggtgtacctttataagtacattcaattttatgatttacatttatcatgtaatttttaaaaaaatccatctatctaggatatgttgatacaaagtctgcttttgctattctttttgcttaaatactcctatcattttctgaattacttggtatttagaactcctagcaccacggggaagaatagaggtatcatcaaacgtggcaaattttctttcaggaataataaagagcatgattccacagcttttctgggatgtttgagattcttttttagtactaagcaaaattctcatcacagaatgtagcccaggccaatttataactaaatctctatttgttcggatgatgcttctaaaacagcattgataggttaaagaagcttggtatttttaatttacttcaatgattagctcagttgcttaactggagttttaatcctgtgatatgtacattggattcatgactgtgcagcatttttagttatgtggtgtttggcagaatgacaataaggttttcccccattttggtttcaggaggacatgaatagtgtgtttattgtaactcctcatacacttttaaaaccaacatcttttttcataaatgttggtagtgtttgtccaggtaccttaactgtagcttgtgtaatgttgatgaatatctgtatcttacggcttccataatggctagttgatattcaaaaacctatttctgtgttttgaggggtggggaaaaaaaacactaagtgataatttgaaaaaggcatattgcttccagattctgatgtgtgagggaaaatactgtcacaatgaaaatcttgacaatttacttaacaagtaaccagtagttcatcaaaaccaacttgtacagactaataaatctttttcacagtattcagttttctcacctcttgctattgtatattgtagatttttttcattcatgtgttatttaatttacactgatctctgctattttaaccccccaaataagttatttgtcctttaaggttggttactataatacccctcagtaagattccagtattaatttctgggcagtttgttctctgtatacaattgcaaatgataagcatttttgtgagtgaccacctttgcaatatgtttgttaatttacttcatgttgggttctttctgaaatgtacatctttacatataaaaacctcacattctacttgatttacacttcctagtctacattacatgtggttgaaggttttatacattctatatgcttttactaaatatacaagatttactactagaaatttggagaaagaacactaacacatgtacttgtgatttgttcatgttatattaaaacttgagatttgtgtatttatgtagagtctgtattgacaagactgttgttttttgctccttgagctatataataatctgtgtattggattgttgtcttgatttggtctaaatttgaatatatatgagttacttgaatataacaaaaatgaattttgtttgatagatttatattgtaacctttttctagttcttgaataaatatagcctgctttccctagatgcatttgtgtaggaagtatatacatttccctattactctcatcagctgaagaatatgtactattgtgttactcaaattatgtggctttcattttgttgttttgttgcaagcttagtgttttgtagtggaggttttgtaaatgaaacagttgtaatatctaaggtcaggcacctagtaacagggttttgttaattcttttcagaatcattgaagcagtcttaaagggtcttttgcagatggtacaaattagaacaattagaatatagtattttgagttctagtagtactgagattgacccaaacaaataaaaaactattcaatttctgagtaatagttaaaaaaaaaaaaaaaaaaaaa

SEQ ID NO: 2382 - protein, 206 aa, Homo sapiens
  ref <308>: DATABASE ACCESSION NUMBER: Refseq / NP_067075
  ref <309>: DATABASE ENTRY DATE: 2002-12-23
MDEDVLTTLKILIIGESGVGKSSLLLRFTDDTFDPELAATIGVDFKVKTISVDGNKAKLAIWDTAGQERFRTLTPSYYRGAQGVILVYDVTRRDTFVKLDNWLNELETYCTRNDIVNMLVGNKIDKENREVDRNEGLKFARKHSMLFIEASAKTCDGVQCAFEELVEKIIQTPGLWESENQNKGVKLSHREEGQGGGACGGYCSVL

SEQ ID NO: 2383 - DNA, 4696 bp, Rattus norvegicus
  ref <308>: DATABASE ACCESSION NUMBER: Refseq / NM_052807
  ref <309>: DATABASE ENTRY DATE: 2003-01-13
tttttttttttttgagaaaagggaatttcgtcccaaataaaaggaatgaagtctggctccggaggagggtccccgacctcgctgtgggggctcgtgtttctctccgccgcgctctcgctctggccgacgagtggagaaatttgtgggcccggcattgacatccgcaacgactatcagcagctgaagcgcctggaaaactgcacggtgatcgagggcttcctccacatcctgctcatctccaaggccgaggactaccgaagctaccgcttccccaagctcacagtcatcaccgagtacttgctgctgtttcgagtggccggcctcgagagcctgggagacctcttcccgaacctcacagtcatccgtggctggaaactcttctacaattacgcactggtcatcttcgagatgaccaatctcaaggatattgggctttataatctgaggaacattactcggggggccatcaggattgagaaaaacgctgacctctgttacctctccaccatagactggtctctcatcttggatgcggtgtccaataactacattgtggggaacaagcccccaaaggaatgtggggacctgtgtccagggaccttggaggagaagcccatgtgtgagaagaccaccatcaacaatgagtacaactaccgctgctggaccacaaatcgctgccagaaaatgtgcccaagtgtgtgtgggaagcgagcctgcaccgagaacaatgagtgctgccacccggagtgcctaggcagctgccacacaccggacgacaacacaacctgcgtggcctgccgacactactactacaaaggcgtgtgcgtgcctgcctgcccgcctggcacctacaggttcgagggctggcgctgtgtggaccgggatttctgcgccaacatccccaacgccgagagcagtgactcagatggcttcgtcatccacgatggcgagtgcatgcaggagtgtccatcaggcttcatccgcaacagcacccagagcatgtactgtatcccctgtgaaggcccctgccccaaggtctgcggcgatgaagaaaagaaaacgaaaaccatcgattctgtgacgtctgcccagatgctccaagggtgcaccattttgaagggcaatctgcttattaacatccggcgaggcaataacattgcctcggaattggagaacttcatggggctcatcgaggtggtgactggctacgtgaagatccgccattcccatgccttggtctccttgtccttcctgaagaaccttcgtctcatcttaggagaggagcagctagaaggaaactactccttctatgtcctggacaaccagaacttgcagcagctgtgggactggaaccaccggaacctgaccgtcaggtcagggaaaatgtacttcgctttcaatcccaagctgtgtgtctctgaaatttaccgaatggaggaggtgacaggaacaaagggacggcagagcaaaggagacataaacaccaggaacaacggagagcgagcttcctgtgaaagtgatgttctccgtttcacctccaccaccacctggaagaaccgcatcatcataacgtggcaccggtaccggccgccggactaccgggatctcatcagtttcacagtctactacaaggaggcaccctttaaaaacgtcacggaatacgacgggcaggatgcctgtggctccaacagctggaacatggtggacgtggacctgcctccgaacaaggagggggagcctggcattttgctgcatgggctgaagccctggacccagtatgcagtctatgtcaaggctgtgaccctcaccatggtggaaaacgaccacatccgtggggccaaaagtgaaatcttgtacattcgcaccaacgcttcagttccttccattcctctagatgtcctctcggcatcaaactcctcctctcagctgatcgtgaagtggaaccccccaactctgcccaatggtaacttgagttactacattgtgaggtggcagcggcagccgcaggatggctatctgttccggcacaactactgctccaaagacaaaatacccatcagaaagtacgccgatggtaccatcgatgtggaggaggtgacagaaaatcccaagacagaagtctgcggtggtgataaagggccgtgctgtgcctgtcctaaaaccgaagctgagaagcaggctgagaaggaggaggctgagtaccgtaaagtctttgagaatttccttcacaactccatctttgtgcccagacctgagaggaggcggagagatgtcctgcaggtggctaacaccaccatgtccagccgaagcaggaacaccacggtagctgacacctacaatatcacagacccggaagagttcgagacagaataccctttctttgagagcagagtggataacaaggagaggactgtcatttccaacctccggcctttcactctgtaccgtatcgatatccacagctgcaaccacgaggctgagaagctgggctgcagcgcctccaactttgtctttgcaagaaccatgccagcagaaggagcagatgacattcctggcccagtgacctgggagccaagacctgaaaactccatctttttaaagtggccagaacccgagaaccccaacggattgattctaatgtatgaaataaaatacggatcgcaagtcgaggatcagcgggaatgtgtgtccagacaggagtacaggaagtatggaggggccaaacttaaccgtctaaacccagggaactatacggcccggattcaggctacctccctctctgggaatgggtcgtggacagatcctgtgttcttctatgtcccagccaaaacaacgtatgagaatttcatgcatctgatcattgctctgccggttgccatcctgctgattgtggggggcctggtaatcatgctgtatgtcttccatagaaagaggaataacagcagattgggcaacggggtgctgtacgcctctgtgaaccccgagtatttcagcgcagctgatgtgtacgtgcctgatgaatgggaggtagctcgggagaagatcaccatgaaccgggagctcggacaagggtccttcgggatggtctatgaaggagtggccaagggcgtggtcaaggacgagcctgaaaccagagtggccatcaagacagtgaatgaggctgcaagtatgcgtgagagaattgagtttctcaacgaggcctcagtgatgaaggagttcaactgtcaccatgtggtccggttgctgggtgtagtatcccaaggccagcccaccctggtcatcatggaactaatgacacgtggcgatctcaaaagttatctccggtctctaaggccagaggtggagaataatctagtcctgattcctccgagcttaagcaagatgatccagatggctggagagattgcagatggcatggcctacctcaatgccaacaagttcgtccacagagacctggctgctcggaactgcatggtagctgaagatttcacagtcaaaattggagattttggtatgacacgagacatctacgagacggactactaccggaaaggcgggaagggcttgctgcctgtgcgctggatgtctcccgagtccctcaaggatggcgtcttcaccactcattccgatgtctggtcctttggggtcgtcctctgggagatcgccactctggctgagcagccgtaccagggcctgtccaacgagcaagttcttcgtttcgtcatggagggcggccttctggacaagccggataactgccccgatatgctgtttgaacttatgcgcatgtgctggcagtacaaccccaagatgcggccctccttcctggagatcatcggaagcatcaaggatgagatggagcccagtttccaggaggtctccttctactacagcgaggagaacaagcctccagagccggaggagctggagatggagctggagctggagcccgagaacatggagagcgtcccgctggacccttcggcctcctcagcctccctgcctctgcctgaaagacactcaggacacaaggctgagaacggccctggcgtgctggttctccgtgccagttttgatgagagacagccttacgctcacatgaatgggggacgcgccaacgagagggccttgcctctgccccagtcctcgacctgctgatcctcgaccccgaagcacgtgcaaacagtaacgtgtgtgtgtgtgtgcgtgcgtgcgtgtgtgctcactcggtgggcggaggggggagcaggttgtaacaatctattcacaagcctcctgtatctcagtggatcttcagaactgcccttgctgcccacgggagtcggcttctctgcagtaaacacacttgggaccttccttttttcaatatgcaagcagctttttttatttccctacccaaacccttaactgacatgggcctctgcaaaccttaatgacagctcttaatagcaacaggacactcgagaattgagtctcctcattctctgccttttctctcttctgccttccctctctctcctctcccttcccacttccaggctctcctctcttttctccgcttcccagtggaaagcccagcggggaagcctttatttattttttttttaaatcaaattgacttaatggctgccctggggctcctcatcacacctgcctgagcaccataggtctttacaaaaaagaaaggaaaaaaacc

SEQ ID NO: 2384 - protein, 1370 aa, Rattus norvegicus
  ref <308>: DATABASE ACCESSION NUMBER: Refseq / NP_434694
  ref <309>: DATABASE ENTRY DATE: 2003-01-13
MKSGSGGGSPTSLWGLVFLSAALSLWPTSGEICGPGIDIRNDYQQLKRLENCTVIEGFLHILLISKAEDYRSYRFPKLTVITEYLLLFRVAGLESLGDLFPNLTVIRGWKLFYNYALVIFEMTNLKDIGLYNLRNITRGAIRIEKNADLCYLSTIDWSLILDAVSNNYIVGNKPPKECGDLCPGTLEEKPMCEKTTINNEYNYRCWTTNRCQKMCPSVCGKRACTENNECCHPECLGSCHTPDDNTTCVACRHYYYKGVCVPACPPGTYRFEGWRCVDRDFCANIPNAESSDSDGFVIHDGECMQECPSGFIRNSTQSMYCIPCEGPCPKVCGDEEKKTKTIDSVTSAQMLQGCTILKGNLLINIRRGNNIASELENFMGLIEVVTGYVKIRHSHALVSLSFLKNLRLILGEEQLEGNYSFYVLDNQNLQQLWDWNHRNLTVRSGKMYFAFNPKLCVSEIYRMEEVTGTKGRQSKGDINTRNNGERASCESDVLRFTSTTTWKNRIIITWHRYRPPDYRDLISFTVYYKEAPFKNVTEYDGQDACGSNSWNMVDVDLPPNKEGEPGILLHGLKPWTQYAVYVKAVTLTMVENDHIRGAKSEILYIRTNASVPSIPLDVLSASNSSSQLIVKWNPPTLPNGNLSYYIVRWQRQPQDGYLFRHNYCSKDKIPIRKYADGTIDVEEVTENPKTEVCGGDKGPCCACPKTEAEKQAEKEEAEYRKVFENFLHNSIFVPRPERRRRDVLQVANTTMSSRSRNTTVADTYNITDPEEFETEYPFFESRVDNKERTVISNLRPFTLYRIDIHSCNHEAEKLGCSASNFVFARTMPAEGADDIPGPVTWEPRPENSIFLKWPEPENPNGLILMYEIKYGSQVEDQRECVSRQEYRKYGGAKLNRLNPGNYTARIQATSLSGNGSWTDPVFFYVPAKTTYENFMHLIIALPVAILLIVGGLVIMLYVFHRKRNNSRLGNGVLYASVNPEYFSAADVYVPDEWEVAREKITMNRELGQGSFGMVYEGVAKGVVKDEPETRVAIKTVNEAASMRERIEFLNEASVMKEFNCHHVVRLLGVVSQGQPTLVIMELMTRGDLKSYLRSLRPEVENNLVLIPPSLSKMIQMAGEIADGMAYLNANKFVHRDLAARNCMVAEDFTVKIGDFGMTRDIYETDYYRKGGKGLLPVRWMSPESLKDGVFTTHSDVWSFGVVLWEIATLAEQPYQGLSNEQVLRFVMEGGLLDKPDNCPDMLFELMRMCWQYNPKMRPSFLEIIGSIKDEMEPSFQEVSFYYSEENKPPEPEELEMELELEPENMESVPLDPSASSASLPLPERHSGHKAENGPGVLVLRASFDERQPYAHMNGGRANERALPLPQSSTC

SEQ ID NO: 2385 - DNA, 505 bp, Homo sapiens
  ref <308>: DATABASE ACCESSION NUMBER: EMBL / BF061073
  ref <309>: DATABASE ENTRY DATE: 2000-10-18
ttttttttttttgagaaaggggaatttcatcccaaataaaaggaatgaagtctggctccggaggagggtccccgacctcgctgtgggggctcctgtttctctccgccgcgctctcgctctggccgacgagtggagaaagtgagtatgtgcccgccgcccgcggccactgcgggaacttttcctccgaggggctgcgccctgtttgcgaaacccgagttgccaccgtcgcagctgtcgggcccccgggctcgggagcggcggggtggggcgcagggcggctctgccgggagggaggctgcagcggacccgggacccgggctcgttcgtctggagccccgcgagccctggccttggttttgttgtggtcggcgtcgtgtcgccctctcttctgccgccccgcacttcctttgtacgtagttaataagcagtgtcgctccacattcgctgtcttttgcaatctgatagcttttgttttggtggtgtcgggtgggggttagtaagggaa

SEQ ID NO: 2386 - DNA, 518 bp, Rattus norvegicus
  misc_feature (1)..(518): n=a, c, g or t
  ref <308>: DATABASE ACCESSION NUMBER: EMBL / AA859796
  ref <309>: DATABASE ENTRY DATE: 2000-03-03
tttttttttttttttttagtcttgtaccccatggagcccttgggccaacacaaggcccgtgaggctgtccaagttttggggcttctctggcactggcaccgacagccagtaagaaggcctgcgggagctgcaggcctggctcagggtcaaagtccctggttcctggagagtatcacagcgcatcctcttcagtgcagcccccaccaatcatgaaacgaaattcctgcaggtttgagactccatggaagtgaacaaaggcaccagcaaccacaaagatgtggaagagctgatgagagtgaaaccagatgtcacatttgccaggaaagaagcgctcagggatacgggccgcgtagagggcagctcctgtgatatagaggctagccatgagcattagccagcctatctgccctatggtggcagccttcaggaacccttctgagatgacataatgcaaggtanggatgattccactcagacctaagcccacgaacactcctgctctgaccccccgatactga

SEQ ID NO: 2387 - DNA, 2681 bp, Rattus norvegicus
  ref <308>: DATABASE ACCESSION NUMBER: Refseq / NM_031987
  ref <309>: DATABASE ENTRY DATE: 2003-01-13
gagtgcagagagccaagccgggtgcaggagttttcttactgtgactataccatggaaaatcaattggctaagtcaattgaagaacgaacattccagtaccaggactctcttccgcccttgcccgttccttcgcttgaagaatcactgaagaagtaccttgagtcagtgaagccatttgcaaatgaagacgaatacaagaaaactgaagaaatagttcaaaagtttcaagatggagttggcaagacattgcatcagaagttacttgaaagggctaaaggaaaaagaaactggctggaagagtggtggctcaatgtcgcctacttggatgtgcgtattccatcacaactgaacgtgaactttgtgggtccgtctccccactttgaacactactggcctgcaagggaaggcactcagttggaaagaggaagcatactactgtggcacaacttgaactactggcagctgctaagaagagaaaaattgcctgtacataaatctggaaatactcctctagacatgaaccaattccggatgctgttttctacctgcaaggttccgggaatcactagagattcgattatgaattattttaagactgagagcgaggggcattgtccgacccacattgccgtgctgtgtcgaggcagagcgtttgtcttcgatgtcctccatgacggttgtttgatcaccccaccagaacttctcagacaactgacatacatctaccagaaatgctggaatgaacctgttgggcccagtatagcggcattaaccagtgaggagcgaactcggtgggcgaaggcaagagaatatctgattggtcttgatccagagaacttgactttattagaaaaaattcaatccagtttatttgtgtattccatagaagacaccagtccacatgcaaccccagaaaatttttctcaggtctttgaaatgcttcttggtggagatccagcagtgcgctggggtgacaagtcctataatctgatttcctttgctaacggaatatttggctgtagctgtgatcatgctccttatgatgcaatgcttatggtgaacattgctcactatgttgatgagaagctcctagagacggaagggagatggaagggttcagaaaaagtccgggatataccgttgccagaggagctggctttcactgtggatgagaagatactgaatgacgtctaccaagccaaagcccaacacctcaaagcagcatctgatttacagatagcagcatctaccttcacatcttttggcaaaaagctcactaagaaggaggcccttcaccctgacacctttattcagctcgctcttcagctcgcctactacagacttcatggacgccccggttgctgctatgaaacagctatgacaagatacttttaccatggccgaacagagactgtgcgatcttgtacagtggaggccgtcaggtggtgccagtccatgcaggatccttctgccagtctccttgaacgtcagcaaaagatgttagacgcttttgcaaagcataacaagatgatgagagattgttcccatggaaaaggatttgaccgtcaccttttaggccttttgctcatagcaaaagaggaaggcctccctgttccagaactgtttgaggatccacttttctccagaagtggaggaggtgggaattttgtgctgtcaacaagtctggttggttacttacgaattcagggagtcgtggttcccatggtacataatggatacggctttttctaccacatcagagatgacaggtttgtggtgacatgttcatcctggaggtcatgtcttgagactgatgcagaaaagttagtggagatgatttttcatgctttccacgatatgatacatctgatgaacacggctcatctttagagactcagagacatacaggtcacagaaactgggtacggagaatgggatggtgatacgacatggaaggaatgttgacttaaaggaaacctgttaatgcagggattagagagggatgcactctagatttattctaccttaaagccttctgttgcaacagcaatgcaaactcagacatagtgaatagaactatgcaatgttttaagcctcaacaatgcacatctgtatattttaacaatacaaatcctactctaatgttaaaatatttttgttggcacatgtgtaggttgcaagtcctctgtgaacataattatagagtatttctcaagcactttaatactttctaatggccagagggtataaaacccatggttagatgctaatttccctgacatcagtgccttctacatccagcacaggagtacaagcctatgagatttcatgggaaaaccactattgttcaatattgatctaaaatagctcctttgaacagacaaaagtatcaagttgtattagaaaagaatattagcaaaactcattatgatatgttgtaattaattttgtgaatataaaatcaaaacacttccatttaaatctacttggtagagttagtggctttaaagggttaaatgtcgagtatgattctcagaactttataattatttcccactgttattcaaaatgttagcatatagacattctcccattgtaattcagtgtttatattctcaaagaataaagcatccagaatccttgtaatttctcatttattttcaataaaaatgattcctgat

SEQ ID NO: 2388 - protein, 612 aa, Rattus norvegicus
  ref <308>: DATABASE ACCESSION NUMBER: Refseq / NP_114193
  ref <309>: DATABASE ENTRY DATE: 2003-01-13
MENQLAKSIEERTFQYQDSLPPLPVPSLEESLKKYLESVKPFANEDEYKKTEEIVQKFQDGVGKTLHQKLLERAKGKRNWLEEWWLNVAYLDVRIPSQLNVNFVGPSPHFEHYWPAREGTQLERGSILLWHNLNYWQLLRREKLPVHKSGNTPLDMNQFRMLFSTCKVPGITRDSIMNYFKTESEGHCPTHIAVLCRGRAFVFDVLHDGCLITPPELLRQLTYIYQKCWNEPVGPSIAALTSEERTRWAKAREYLIGLDPENLTLLEKIQSSLFVYSIEDTSPHATPENFSQVFEMLLGGDPAVRWGDKSYNLISFANGIFGCSCDHAPYDAMLMVNIAHYVDEKLLETEGRWKGSEKVRDIPLPEELAFTVDEKILNDVYQAKAQHLKAASDLQIAASTFTSFGKKLTKKEALHPDTFIQLALQLAYYRLHGRPGCCYETAMTRYFYHGRTETVRSCTVEAVRWCQSMQDPSASLLERQQKMLDAFAKHNKMMRDCSHGKGFDRHLLGLLLIAKEEGLPVPELFEDPLFSRSGGGGNFVLSTSLVGYLRIQGVVVPMVHNGYGFFYHIRDDRFVVTCSSWRSCLETDAEKLVEMIFHAFHDMIHLMNTAHL

SEQ ID NO: 2389 - DNA, 454 bp, Rattus norvegicus
  ref <308>: DATABASE ACCESSION NUMBER: EMBL / AA893087
  ref <309>: DATABASE ENTRY DATE: 2000-03-03
ttgtctgtcagtagttctgttgagcacgggcgacccagtgtgttaggtcccacgctgtgaccctaacaagtctgctaatgctgtggcagaagttaggcccacgtgcctcagggaatgttgctggttaacttttttgtcagcttgacccaagttagagttatctgggaagagagacctgtaggcatatccgtgtggccttttcttgatgaccggttgatatgagaggctcagttcactgtgggtggggtcatccctgggctgatggtcctgggttgcgtaagaaaggaagctgagtaagccatggggagcaagccagtaagcagaactcctccatggcctctgcttcagtgcctgcctccatgttcccgccttgacttctctcaaggatggattgtgacctggaagtgtaagcagaataaacccttttctgtctccatttgtcttttatcacagc

SEQ ID NO: 2390 - DNA, 1688 bp, Rattus norvegicus
  ref <308>: DATABASE ACCESSION NUMBER: Refseq / NM_012994
  ref <309>: DATABASE ENTRY DATE: 2003-01-14
cgcaggggcgttaggcttccgagacgcgccgggctctgggaaccccggtcaccgctcaagccctcccgcctgcggacctcactcgctcgtttctggagctggattgactcgcttttccaatcttcgcgtccccccttcccagctttttgactccatcactccacaccaagaccccctttcccctgcttgatcatcagccttgtccgcgtggtcatgggatgtctaatttcatttgtatctaggctgctgagagcgctccctgctctgtaaagtggatgtcaggtggatctatgtttttgaaggaacaaagactcagccaaggcaccgccaaggaagtttgagaggagggaggatgcaggctgcgtgctggtacgttcttcttctcctgcagcccaccgtctacttggtcacgtgtgccaatctaacaaatggtggaaagtcggaacttctgaagtcaggaaacagcaagtctacactaaaacacatatggacagaaagcagcaaagacttgtctatcagtcggctcctctcacagactttccgtggtaaagaaaatggcacagatttggacctgcgctatgacaccccagaaccttattccgagcaagacctctgggactggttgaggaactccacagatcttcaggagcctcggcccagggccaaaagacggcccattgttaaaaccggcaagtttaagaaaatgttcggatggggtgattttcattccaacatcaaaacagtgaagctaaacctgttgataactgggaaaattgtagatcatggcaatggaacgtttagtgtgtatttcaggcataattccactggtcaagggaatgtatctgtcagcctggtgcccccaacaaaaattgtggaattcgatttggcacaacaaaccgtgattgatgccaaagattccaagtccttcaactgtcgtattgaatatgagaaggttgacaaggccaccaagaacacactctgcaactacgacccttcaaaaacctgttaccaggagcagacccaaagtcacgtgtcctggctctgctctaagcccttcaaggtgatctgtatttacatttccttttatagtacagactataaactagtacagaaagtatgccctgactacaactaccacagtgacacaccttacttcccctccggatgaagacgaacagggcatgagactgaagcctgaggaattacaggtcataggacagggctgttaccttaaggaagaaggtcacatctgttgcctggaatgtgtctacactgctgctcttgttgactggtgcgaacatgctagtggaaaacaattgatgtaatttctgcacagtcagcttcatctctcagcatagttgtaaatcaccatagctctcagagtctcatctgaagacatgctgtcactgtagagacacatgagcacccactcctgcacatttcagctcacatctatcatggtaccctttgagagggctttcattgtcttgactcatgatggttcaggataaactatgatcaaacacaaagaattaactagacagaggatgtatctaacatgccgttatggaaatctcttttaaggtcttgagtccatgctaatcaatagtccccactcatgcattcctactgcttggagtagctgtgctggtgaatactactgtaggagttatatgcttgttaaatgg

SEQ ID NO: 2391 - protein, 271 aa, Rattus norvegicus
  ref <308>: DATABASE ACCESSION NUMBER: Refseq / NP_037126
  ref <309>: DATABASE ENTRY DATE: 2003-01-14
MQAACWYVLLLLQPTVYLVTCANLTNGGKSELLKSGNSKSTLKHIWTESSKDLSISRLLSQTFRGKENGTDLDLRYDTPEPYSEQDLWDWLRNSTDLQEPRPRAKRRPIVKTGKFKKMFGWGDFHSNIKTVKLNLLITGKIVDHGNGTFSVYFRHNSTGQGNVSVSLVPPTKIVEFDLAQQTVIDAKDSKSFNCRIEYEKVDKATKNTLCNYDPSKTCYQEQTQSHVSWLCSKPFKVICIYISFYSTDYKLVQKVCPDYNYHSDTPYFPSG

SEQ ID NO: 2392 - DNA, 376 bp, Rattus norvegicus
  ref <308>: DATABASE ACCESSION NUMBER: EMBL / AA892960
  ref <309>: DATABASE ENTRY DATE: 2000-03-03
gaacatgttgtcaggaagggataaaaggctggctgagcaagtctcctcatacaatgaatcaaaaaggtcagaatccctcatggacattcatcataagaggttaaagactaaggctgctgaagataagaacaggcaccaggagagaacccctttcgatcgtgataaagatctcaaggttaaccggtttgatgaggcacagaaaaaagcccttataaagaaatccagagaactgaacacccggttttcacatggcaaaggcaacatgtttttataagtaagtgtacttcagtgaggtacacgcatactgatcagcctgaagccctcagaatatgcctttgtccatagtaattatgtgcacaaatacatttccttttgt

SEQ ID NO: 2393 - DNA, 1371 bp, Homo sapiens
  ref <308>: DATABASE ACCESSION NUMBER: Refseq / NM_018559
  ref <309>: DATABASE ENTRY DATE: 2000-11-02
gggatagggttgacgttcgtggatagactcatatctgtgaccagtgtccgccaccgggatgagcaagagacctgatcggaccggccctgcccccggcttcaaggcccgcggaacagcgaggacgaagagcgggacccgagccctgttgcaggaccagctctgccccctaattataaaagcagtagttcagattcatcagacagcgatgaagacagtagttctttgtacgaagaaggaaatcaagaatctgaagaagatgacagtggtccaactgcaagaaaacagaggaaaaatcaggatgatgacgatgatgatgatgatcgggtttttgggaccagcccttcctcctgggttttaaaaagcagggtgattctcctccaaggcccataataggtcctgcattgccacctggtttcattaaatctacacagaaaagtgacaagggcagagatgatccaggacaacaggaaacagacagcagtgaagatgaggatattattggaccaatgcctgcaaaaggaccagttaactataatgtaactgacagagtttgaaaaaagggcccagagaatgaaagaaaaactgaccaaaggagatgatgattcatctaaacccattgtaagagagtcatggatgactaaacttcctccagaaatgaaagactttggtcttgggccaaggacttttaagagaggagctgatgacacatctggagatcgatcaatctggacagatactccagctgatagggaaaggaaagctaaggaaacacaagaagcaagggagtcatccagtaagaaagatgaagaacatatattatcaggaagagataagagactggctgagcaggtatcttcatacaatgaatcaaaaagatcagaatctcttatggacatacatcataaaaagttaaagagtaaggctgctgaagacaaaaataagcctcaagagagaataccatttgaccgtgataaagatctcaaggttaatcggtttgatgaagctcagaaaaaagccctaataaaaaaatctagagaactaaacaccagattttcacacggcaaaggcaatatgtttttataagtaagtatatttcagtgaggtatattttaatactgatcaatgtgaacttttctaaatactctattgtctttaataattgtgctgaaatctatttccttttataatagattaaaaattttatatttttataagtaaacagtgatttttgaaaagtcagccttgtgggatgaaaaatatgtcttactggaaaaatccctcataataacctaatagggcattgctattaaaaatgctaaaataaaaattcagcttatgagaaatggcaaaaaaaaaaaaaaaaaaaaaaaa

SEQ ID NO: 2394 - protein, 170 aa, Homo sapiens
  ref <308>: DATABASE ACCESSION NUMBER: Refseq / NP_061029
  ref <309>: DATABASE ENTRY DATE: 2000-11-02
MKEKLTKGDDDSSKPIVRESWMTKLPPEMKDFGLGPRTFKRGADDTSGDRSIWTDTPADRERKAKETQEARESSSKKDEEHILSGRDKRLAEQVSSYNESKRSESLMDIHHKKLKSKAAEDKNKPQERIPFDRDKDLKVNRFDEAQKKALIKKSRELNTRFSHGKGNMFL

SEQ ID NO: 2395 - DNA, 4276 bp, Rattus norvegicus
  ref <308>: DATABASE ACCESSION NUMBER: Refseq / NM_013159
  ref <309>: DATABASE ENTRY DATE: 2003-01-14
gcggctgcgcggggtatgcggaacgggctcgtgtggctgctgcaccccgcgctgcccagcaccttgcactccatcctcggcgctcgcccgcctcccgtgaagcgactgtgtggattcccaaaacaaatttacagcacaatgaataatccggccatccagagaatagaagaccatattgtcaagtctcctgaagacaaacgggaatatcgtggactagaactggccaatggtatcaaagtgcttctcatcagtgatcccaccacggacaagtcatcagcagcactcgacgtgcacatagggtcactgtcagaccctccaaatattcctggcttaagccatttttgtgagcatatgctgtttttgggaacaaagaaatatcctaaggaaaatgaatacagccagtttctcagtgaacatgctgggagttcaaatgcatttaccagcggagaacacaccaattattatttcgatgtttcccatgaacacttggaaggagccctggacaggtttgcccagtttttcctgtgccccttgtttgatgcaagttgtaaggacagagaggtgaacgctgtcgattcagagcatgaaaagaatgtgatgaatgatgcctggagactcttccagctggaaaaggctacagggaatcccaagcaccccttcagcaaattcgggacaggaaacaaatatactctagagactcgacccaaccaagaaggcatcgatgtaagggaagaactcttgaaatttcactctacgtattattcgtccaatctgatggcgatttgtgttttaggtcgagaatctttagatgacctgactaatctggtggtgaagttattttctgaagtagagaataaaaatgtccctttgcctgaatttcctgagcaccctttccaagaagaacatcttaaacaactttataaaatagtacccattaaggatattaggaatctttatgtgacatttcccataccagaccttcaacagtactacaaatccaatcccggtcattatctcggtcatctgatcgggcatgaaggtcctggaagcctgttgtcagagctcaagtcaaagggctgggtaaacaccctggttgggggacagaaggaaggagcccgaggttttatgttttttatcattaatgtggacttaactgaagaagggttattacatgttgaagatataattttgcacatgtttcaatacattcagaagctacgtgctgaaggacctcaagaatgggttttccaagagtgcaaggacttgaacgctgtcgctttcaggtttaaagataaagagaggccacgaggctacacatctaagattgcagggaaattgcactattatcccctaaatggagtgctcacagctgaatatttactggaagaatttagacccgacttgatagacatggttcttgataaactcagaccagaaaatgtccgggtggcaatagtttctaaatcatttgaagggaaaactgaccgcacagagcagtggtatggaacccagtacaagcaagaagctatcccagaggacgtcattcagaaatggcaaaatgctgacctgaatgggaaatttaaacttccaacaaagaatgaattcattcctacaaattttgagattttggcattagaaaaagatgcaacaccataccctgctcttattaaggatacagccatgagtaagctgtggttcaaacaagatgataaatttttcttgccgaaagcttgtctcaactttgaatttttcagcccgtttgcttatgtggaccccttgcactgtaacatggcctatttgtaccttgaactcctcaaagactcactcaacgagtatgcatatgcagcagagctagcaggcctgagctatgatctccaaaacaccatctatgggatgtatctctcagtgaaaggttacaatgacaaacagccaattttgctaaagaagatcaccgagaaaatggctacttttgagattgataaaaaaagatttgaaattatcaaagaggcgtacatgcgatctcttaataatttccgggctgagcagcctcaccagcacgccatgtactacctccgtctgctgatgactgaagtggcctggaccaaagatgagttaaaagaagccctcgatgatgtgaccctcccccgtcttaaggccttcatacctcagctgctgtcccggctgcatattgaagcccttctccatggcaacataacaaagcaggctgccttaggagttatgcagatggtagaagacacccttattgagcatgctcacaccaaacctctccttccaagtcagctagtccggtacagagaagttcagctccccgaccgaggatggtttgtttaccagcggaggaacgaagtccacaataactgtggcattgagatttactaccagacagacatgcagagcacctcggagaacatgttcctggagctcttctgccagattatctctgagccttgcttcaacactctgcgtaccaaggagcagcttggctatattgtcttcagtggacctcgtcgggccaacggcatccagggcttgcgattcatcatccagtcagaaaaaccacctcactacctggaaagcagagtggaagccttcttgatcaccatggaaaaggccatagaggacatgacagaggaggctttccaaaaacacattcaggcgttagcgattcgccgactcgacaaaccaaagaaactctctgcagagtgcgcgaagtactggggggagatcatctcccagcagtacaattatgacagagataacatagaggttgcatatttaaagacactcagcaaggatgatatcatcaaattctacaaggaaatgttggctgtggacgcaccaaggagacataaagtatccgtccacgttcttgccagggaaatggattcttgtcctgtggttggagagttcccctctcagaatgatataaacctttccgaagcgccacccttgccacaacctgaggtgattcataacatgactgaattcaagcgcggcctgccgctgttcccccttgtgaagccacacattaacttcatggcggcaaaactctgaagaagcagctgcgcccctgtgccttccggggccaggaaagcagtctcagctttgagtagtttctggcttgcaattagagagacaaacagaaaagagttatcaggcattattatgtagaatgttaaaaacccaaagtaataaaattataaagtcttatagatgtagaatatttttaaaatctcttaaatattttaatgtttttctttttattcctaaaagaaatttccttatattaactgcttaatctgaagaaagatatctcagtacaatctttcttccttattctgtaaaatagtcacttgtctgaaaaaaaaataagagcttttttttcttaaaggcttcagaacacttagaaaggattacctttttaagacgcgatcaagctcagatctgcttctgtcgatggttcctgtgaaccagcagagcatcgcggtgggcagatagtgcacaaagcggttccgcgttcctttactagtgaacctgctgattaactaaggcatggttttaatgtttttataaaacttgggtatgttttttaaccttcttagtcaaatgctagaaaacccagaatacccaatttacagtgctagaaatgcagattaaccttgaatcaagttcggaatttctcaggattcctgtgggttctctctcatcgaattctgttgacatttctgtttctcgtagttggtctgctgggttccatcagcagacacatactgctgtacagcgtgtgagacatgctgtgctgacatcagctgttgtgactccccgtaactcctagggtgaagttgtgatccgtgtgtgaactaaaacatttgcccctttagggactcaaaaggcagcaaatacaaagccacctccttggaggatacaaaactgtggcgttcttaaacagccagtctccgtaagactctaaactccccactgcttccggtctcatcttgccttaagtgttattttttgaatatatgaatataaacatacagatgatgactggagtggacttttaaaaaatatttttttcacaagatactattttaggtgaaaatgttactgtagatttaacagctgttttaaagtatttgctattattaaaacttcttcaagaacaagcgtggctatgctcccacacacaggcaatagtaacagaaagtgctcctgtttgtccaccagctcaggcaaagtacagaatggcgtttcc

SEQ ID NO: 2396 - protein, 1019 aa, Rattus norvegicus
  ref <308>: DATABASE ACCESSION NUMBER: Refseq / NP_037291
  ref <309>: DATABASE ENTRY DATE: 2003-01-14
MRNGLVWLLHPALPSTLHSILGARPPPVKRLCGFPKQIYSTMNNPAIQRIEDHIVKSPEDKREYRGLELANGIKVLLISDPTTDKSSAALDVHIGSLSDPPNIPGLSHFCEHMLFLGTKKYPKENEYSQFLSEHAGSSNAFTSGEHTNYYFDVSHEHLEGALDRFAQFFLCPLFDASCKDREVNAVDSEHEKNVMNDAWRLFQLEKATGNPKHPFSKFGTGNKYTLETRPNQEGIDVREELLKFHSTYYSSNLMAICVLGRESLDDLTNLVVKLFSEVENKNVPLPEFPEHPFQEEHLKQLYKIVPIKDIRNLYVTFPIPDLQQYYKSNPGHYLGHLIGHEGPGSLLSELKSKGWVNTLVGGQKEGARGFMFFIINVDLTEEGLLHVEDIILHMFQYIQKLRAEGPQEWVFQECKDLNAVAFRFKDKERPRGYTSKIAGKLHYYPLNGVLTAEYLLEEFRPDLIDMVLDKLRPENVRVAIVSKSFEGKTDRTEQWYGTQYKQEAIPEDVIQKWQNADLNGKFKLPTKNEFIPTNFEILALEKDATPYPALIKDTAMSKLWFKQDDKFFLPKACLNFEFFSPFAYVDPLHCNMAYLYLELLKDSLNEYAYAAELAGLSYDLQNTIYGMYLSVKGYNDKQPILLKKITEKMATFEIDKKRFEIIKEAYMRSLNNFRAEQPHQHAMYYLRLLMTEVAWTKDELKEALDDVTLPRLKAFIPQLLSRLHIEALLHGNITKQAALGVMQMVEDTLIEHAHTKPLLPSQLVRYREVQLPDRGWFVYQRRNEVHNNCGIEIYYQTDMQSTSENMFLELFCQIISEPCFNTLRTKEQLGYIVFSGPRRANGIQGLRFIIQSEKPPHYLESRVEAFLITMEKAIEDMTEEAFQKHIQALAIRRLDKPKKLSAECAKYWGEIISQQYNYDRDNIEVAYLKTLSKDDIIKFYKEMLAVDAPRRHKVSVHVLAREMDSCPVVGEFPSQNDINLSEAPPLPQPEVIHNMTEFKRGLPLFPLVKPHINFMAAKL

SEQ ID NO: 2397 - DNA, 3350 bp, Rattus norvegicus
  ref <308>: DATABASE ACCESSION NUMBER: EMBL / S64320
  ref <309>: DATABASE ENTRY DATE: 2000-03-04
acagcggctgtgacccgatttctggagctacaacaacaggtcgtctttttgagacgcctttggcgggaaggaccacttcatcagaaggtgaaaaggttctttcttgtaagagactaccactggttgactttccctgtttcctctcacctgctctatataccgaccctgtatcaaccagactgtatcaggggagaagtgaagacacctgtttgaagcaaggctgtctctaaagtcaccctgtgcgtttagatgtgccaggaggtgccctggtccaactgttggcagagctttgtttaggctctatggagagagatttttaggtcactgtattttttttttctctctcttagtattccaaatacttgtctgtgagagaaatctggctttttgggtactgtgacttcaggtgcgccaccttggaataaccgtgttcctgtgagccgtgttccccagtgttttgtctgaggtgaagaagtggggcattttgcttactttcattgtgttactttgggtgacccctgatcactcttgtgacctctacttcagacaacatggcagccggtgttgcagcatggctaccctttgccagggcagccgccattgggtggatgcctgttgcctccgggcctatgccagctcccccaaggcaggagagaaaaaggactcaggacgctctaattgtgctgaacgtgagtggcacccgtttccagacatggcaagacaccctggaacgatacccagacactctgctgggcagttccgagagagactttttctaccacccagagacccaacaatatttctttgaccgtgacccagacatcttccgccacatcctcaacttctaccgcacggggaagcttcactatccccgccatgagtgcatctcggcttatgatgaagaattggccttctttggcctcatcccagaaattattggcgactgctgttatgaggagtacaaggaccgcaggcgggagaatgcagagcgcctccaggatgatgcagacactgacaatacaggagagagtgctctgcccaccatgactgctaggcagagggtctggagggcctttgagaacccccacaccagcaccatggccctggtgttctactatgtgaccgggttcttcattgccgtctcagtcatcgcgaatgtggtggaaacagttccatgtgggtctagcccaggccacataaaagaactgccttgtggggaaaggtatgcagtggccttcttctgcttggataccgcctgtgtcatgatctttacggttgagtacttgctacgcctggccgcagcgcctagtcgttaccgttttgtgcgcagtgtcatgagtatcatcgatgtggtggccatcctaccctattacattgggctggtgatgacagacaatgaggatgtcagtggcgcctttgtcacactccgagtctttcgagtcttcaggatctttaagttttcccgccactctcaaggcctgcgtatactggggtacacactgaagagctgtgcgtcagaactgggcttcttgctcttttccctcacaatggctatcatcattttcgctacggttatgttctacgcagagaagggctcttcagcaagcaagttcaccagcatccctgcagccttctggtacaccatcgtcaccatgacaacactggggtatggcgacatggtaccaaaaaccatagcagggaagattttcgggtctatctgctcactgagcggagtcttggtcatcgcgctacccgtgcctgtgatcgtgtctaacttcagtcggatctaccaccaaaaccaacgagcggacaaacgaagggcacagaagaaagcgaggctggccaggatccgggcagccaaaagtggaagtgcaaatgcctacatgcagagcaagcggaatgggttactgagcaaccaactgcagtcctcggaggatgaaccggccttcgttagcaaatctggatccagcttcgagacacaacaccaccacctgcttcactgcctggagaaaaccacgaaccatgagtttgtggatgaacaagtctttgaagaaagctgcatggaagtggccactgttaatcgcccttcaagtcacagcccctccctctcttcccaacaaggagtcaccagcacttgctgctcacggagacacaaaaaatctttccgaatcccaaatgccaatgtgtcaggaagtcatagaggcagcgtgcaagaactcagtacaattcagatcagatgtgtggagagaactccactatccaacagccgatccagcttaaatgccaaaatggaagagtgtgtcaaactaaactgtgaacaaccttacgtgaccacagcaataattagcattccaacacctccagtaaccaccccagaaggcgacgacaggcccgagtctcctgagtattcgggaggaaacatcgtcagggtgtctgctttgtaagacaattggcacaggtctgagagcatgggagccctgactatggaaagaatctaaaggagaagaaagaagaaataacaacccctttttgcatattaagacagccaagcaagaaggttggcggccgccgtatccatagattcatagatacagttagagccacattcacagaaacattcctgctgtggccgggttttaggtgacttcttggtccgaaactattgtgtcataaatgttttttggtagtattctttggtccactgtattcctgtgacccagtgcattatctgtccctggatctctctagtgtctttctactgggcttacccacccattaatgacaggattagtgtttactgtagttataaaacaaaagattcctgcctttgtactcccaaccagatgttacaaaaagactgtcatcaatccccttgataaaaactagagtaaaggagttgacatgaaatatctctagtgttttcactacttatcgaaaatccagaccctacaaacacccatatgggttttgggaaggagttagatggtactttaaaaaaacaaaaatcacaggatgggtgatttcagaattcaatcaatgtattattttgcttcagatcttcaatacattttgagatcaactgaaatgcagaggtaaactgaagtgctttgtgtaccaatatttgatgagagcatgcttttaatgcatccaaggaagcaacaatgtatcttagaagagtctagtgtaatcacaaggcacaagtctctgcaaaaaatcaagaagaaggagtgtgatgaagttgaccactatgtacatttaagtgaaaagtcttgctaccttttcacccttgaatatccgcagatgtgtctgcacgtcatcgtgtaaaaataaaaataaaaaaaaaaaaaaaa

SEQ ID NO: 2398 - DNA, 168 bp, Rattus norvegicus
  ref <308>: DATABASE ACCESSION NUMBER: EMBL / AA875654
  ref <309>: DATABASE ENTRY DATE: 2000-03-03
ccctcaaaaaaagcaaatggatgctggccatattttgcttttctgacctttccttgggaatctacaagaacctcccttccccctccccgagtaagaccatttaagtgtgtgttaaacaactacaaaatactaaataaaaagtttggccaaaatcaaccatgaagctgc

SEQ ID NO: 2399 - DNA, 1149 bp, Rattus norvegicus
  ref <308>: DATABASE ACCESSION NUMBER: EMBL / Z11504
  ref <309>: DATABASE ENTRY DATE: 1997-02-17
atgaattcaactctgttctccagggttgaaaattactcagttcactataatgtctcagagaattctccatttctggcctttgagaatgatgactgccacctgcccttggctgtgatattcaccttagctcttgcttatggggctgtgattattcttggggtctctggaaacctggcattgatcataatcatcctaaaacagaaagagatgaggaatgtcaccaacattctgatcgtgaacctctccttctcagacttgctggtcgcagtcatgtgtctcccgttcacctttgtgtacacactgatggaccactgggtcttcggggagaccatgtgcaaactgaatccttttgtgcaatgcgtctccattacagtatccattttctctctggttctcatcgctgtggaacgtcatcagctaatcatcaacccaagagggtggagaccaaacaatagacatgcttacataggcattactgtcatttgggtactggcggtggcttcttctctgcccttcgtgatctatcaaattctgactgatgagcccttccaaaatgtatcacttgcggcgttcaaggacaagtatgtatgttttgacaaattcccgtcagactctcacaggctgtcttacacgactcttcttctggtgctgcagtattttggcccactctgtttcatattcatatgctacttcaagatatacattcgcttgaaaaggagaaacaacatgatggacaaaatcagggacagtaagtacaggtccagtgagaccaaacgaatcaacgtcatgctgctctccatcgtggtcgccttcgcggtctgctggctgccccttaccatcttcaacactgtgttcgactggaatcaccagatcattgccacctgcaaccacaatctgctgttcctgctctgccacctcacggccatgatctccacctgcgtcaaccccatcttttatggattcctgaacaaaaatttccagagagacttgcagttcttcttcaacttttgtgacttccggtctcgagacgacgactacgagactatagccatgtctaccatgcatacggacgtgtccaagacttctttgaagcaggcaagcccggttgcatttaaaaaaatcagtatgaatgacaatgaaaaaatctga

SEQ ID NO: 2400 - DNA, 448 bp, Rattus norvegicus
  ref <308>: DATABASE ACCESSION NUMBER: EMBL / AA875646
  ref <309>: DATABASE ENTRY DATE: 2000-03-03
agaaagtttacgtttagctcttgacatagtgatcctgaaaggaaattcacaggtaccagacagaactaattaaacaacttcttcatattaagcctactctgaaaatctgcaataaaataaatgctgctatgttttctggttacaatgactcaaataagtaaaacttgtgctttgaggagcaggtgtttcctacaaaatgttgctggaaatctgtaaagatgttactattaagacaagaactaagatattttaaagtttaagcatactaacttaagtgggcatatgctacaatctcaaaggggccatgtctacatggactaatccgtgcctctgaaaaacaggggtctgaacatgtgaaactttaagcagcacttgtacagaccatgtgcagcataagtcaccagctcaagtctactttaaaaaaaaagaaaaaaacctttttggccgc

SEQ ID NO: 2401 - DNA, 2201 bp, Homo sapiens
  ref <308>: DATABASE ACCESSION NUMBER: Refseq / NM_015640
  ref <309>: DATABASE ENTRY DATE: 2002-11-26
gggggtgggaagagctgaagcaggcgctcttggctcggcgcggcccgctgcaatccgtggaggaacgcgccgccgagccaccatcatgcctgggcacttacaggaaggcttcggctgcgtggtcaccaaccgattcgaccagttatttgacgacgaatcggaccccttcgaggtgctgaaggcagcagagaacaagaaaaaagaagccggcgggggcggcgttgggggccctggggccaagagcgcagctcaggccgcggcccagaccaactccaacgcggcaggcaaacagctgcgcaaggagtcccagaaagaccgcaagaacccgctgccccccagcgttggcgtggttgacaagaaagaggagacgcagccgcccgtggcgcttaagaaagaaggaataagacgagttggaagaagacctgatcaacaacttcagggtgaagggaaaataattgatagaagaccagaaaggcgaccacctcgtgaacgaagattcgaaaagccacttgaagaaaagggtgaaggaggcgaattttcagttgatagaccgattattgaccgacctattcgaggtcgtggtggtcttggaagaggtcgagggggccgtggacgtggaatgggccgaggagatggatttgattctcgtggcaaacgtgaatttgataggcatagtggaagtgatagatctggcctgaagcacgaggacaaacgtggaggtagcggatctcacaactggggaactgtcaaagacgaattaactgacttggatcaatcaaatgtgactgaggaaacacctgaaggtgaagaacatcatccagtggcagacactgaaaataaggagaatgaagttgaagaggtaaaagaggagggtccaaaagagatgactttggatgagtggaaggctattcaaaataaggaccgggcaaaagtagaatttaatatccgaaaaccaaatgaaggtgctgatgggcagtggaagaagggatttgttcttcataaatcaaagagtgaagaggctcatgctgaagattcggttatggaccatcatttccggaagccagcaaatgatataacgtctcagctggagatcaattttggagaccttggccgcccaggacgtggcggcaggggaggacgaggtggacgtgggcgtggtgggcgcccaaaccgtggcagcaggaccgacaagtcaagtgcttctgctcctgatgtggatgacccagaggcattcccagctctggcttaactggatgccataagacaaccctggttcctttgtgaacccttctgttcaaagcttttgcatgcttaaggattccaaacgactaagaaattaaaaaaaaaaagactgtcattcataccattcacacctaaagactgaattttatctgttttaaaaatgaacttctcccgctacacagaagtaacaaatatggtagtcagttttgtatttagaaatgtattggtagcagggatgttttcataattttcagagattatgcattcttcatgaatacttttgtattgctgcttgcaaatatgcatttccaaacttgaaatataggtgtgaacagtgtgtaccagtttaaagctttcacttcatttgtgttttttaattaaggacttagaagttcccccaattacaaactggttttaaatattggacatactggttttaatacctgctttgcatattcacacatggtcaactgggacatgttaaactttgatttgtcaaattttatgctgtgtggaatactaactatatgtattttaacttagttttaatattttcattttgggggaaaaatcttttttcacttctcatgatagctgttatatatatatgctaaatctttatatacagaaatatcagtacttgaacaaattcaaagcacatttggtttattaacccttgctccttgcatggctcattaggttcaaattataactaatttacattttcagctatatttactttttaaatgcttgagtttcccattttaaaatctaaactagacatcttaattggtgaaagttgtttaaactacttattgttggtaggcacatcgtgtcaagtgaagtagttttataggtatgggttttttctcccccttcaccagggtgggtggaataagttgatttggccaatgtgtaatatttaaactgttctgtaaaataaaaaaaaaaaaaaaaaa

SEQ ID NO: 2402 - protein, 387 aa, Homo sapiens
  ref <308>: DATABASE ACCESSION NUMBER: Refseq / NP_056455
  ref <309>: DATABASE ENTRY DATE: 2002-11-26
MPGHLQEGFGCVVTNRFDQLFDDESDPFEVLKAAENKKKEAGGGGVGGPGAKSAAQAAAQTNSNAAGKQLRKESQKDRKNPLPPSVGVVDKKEETQPPVALKKEGIRRVGRRPDQQLQGEGKIIDRRPERRPPRERRFEKPLEEKGEGGEFSVDRPIIDRPIRGRGGLGRGRGGRGRGMGRGDGFDSRGKREFDRHSGSDRSGLKHEDKRGGSGSHNWGTVKDELTDLDQSNVTEETPEGEEHHPVADTENKENEVEEVKEEGPKEMTLDEWKAIQNKDRAKVEFNIRKPNEGADGQWKKGFVLHKSKSEEAHAEDSVMDHHFRKPANDITSQLEINFGDLGRPGRGGRGGRGGRGRGGRPNRGSRTDKSSASAPDVDDPEAFPALA

SEQ ID NO: 2403 - DNA, 5331 bp, Rattus norvegicus
  ref <308>: DATABASE ACCESSION NUMBER: Refseq / NM_019339
  ref <309>: DATABASE ENTRY DATE: 2003-01-14
aacatttcaagacaaaaagcccagtagcatcgtgcattccttgagacatggagtctatggaatagtgggacatgcgaccagccttgacagtacaccacgatgtacagggctggggagccagggaagcggcagtctggccctgcgccccctcgggtgcggagtgtggaagtggcccgaggcagagctggctacggcttcaccctgtcaggacaggcaccctgtgtgctcagctgcgtcatgaggggcagccctgcagatttcgtgggcctccgggctggggaccagatacttgccatcaacgaaatcaatgtgaagaaagcctcacatgaagatgtggtgaaactcatcgggaaatgctctggagtgctgcgcatggtgatctccgagggcagcagccatgtggagccctcttccagcgatgaagaaggcggcctgtgtgaggggaaaggctggctgaggccgaaacttgactctaaggctttgggtataaacagggcagagagggttgtggaagaggtgcagtctggtgggattttcaacatgatctttgaaagcccaagtctttgtgccagtggctctgagcccctgaaactgaagcagaggtccttgtcagagtcagctgctttgcggcttgatgttggccaggacagtctctgtacaccacatcccagcatgctttccaaggaagagatatcaaaggttatcaatgacgattctgtgttcactgtagggctggacaatcacgatgactttggactagatgcaagtattttaaatgttgccatggttgtgggctatttgggctccatcgagctcccttccacaagttccaacctggagcatgacagtttacaggctattcgtggctgcatgcgccgcctgcgggctgagcagaagatccactcactagtgaccatgaaggtcatgcacgactgtgtgcagctggtcactgacagggctggtgtggtggcagagtaccctgccgagaagctggcgttcagtgcagtgtgcccagacgacaggcggttcttcgggctggtgaccatgcagaccaatgatgatgggtgcttggcacaggaagatgaaggtgccctgaggacatcctgccatgtcttcatggtggacccagacttatttcatcacaagatccaccaaggcatcgcgagaagatttggatttgcatgcacggcagatccagacacgagtggctgtttggaattcccagcatcttccctccctgtgcttcagttcatctccgttctgtaccgagacatgggtgaactgattgagggtgtgcgggcccgtgcctttctagatggggatgccgatgcccaccagaataatagcaccagcagcaacagtgacagcggcattggcaatttcaaccaggaagagaagagcaacagggtgcttgtagttgacctgggtgggggctcgagcaggcatggccagggcagtagtccggggtgggagagtgtaagtggaagaggctcacagccttggagtgcaccctggaatggaactttctgccacgactcagaggcgggctccccactggaaaccagccccaacactgacaggttctgggacttaacaaagcattcagggcctgtttttcacatggaggtccctccagccaccttgaggagttctatacccccttccaagaggggtgctacaggttccagctgtggtttcaaccagaggtggctccctgtccatgtgctacaagagtggcagtgtggacatgccagtgaccaggagtcttacacagactctacggacgggtggtccagtgtgaactgtggcacactgccccctcccatgagcaagattcctgcagaccgataccgggtggagggcagctttgctcaggccccactgagtacccagaagagggactggtctcggaaggctttcggaatgcaaaacctatttggaccccatcgaaatgttagaaagaccaaagaggacaaaaagagttccaaattggggcggggagttgccctggcccagacttctcagcgcacttcagctcgcagatcctttggacgatctaggagattcagcctcacgcgctcccttgatgatctcgagtctgcaactgtgtctgatggtgagttgacgggagctgacctgaaggactgcatcagcaacaacagcctgagcagcaatgccagcctccccagtgtgcagagctgccggcgcctaagagagaggagagttgcaagctgggcagtgtcatttgagcgtctgctgcaggatcctgtcggcgtccgctacttctccgattttctacggaaggaattcagtgaagagaacattttattctggcaggcctgtgaatgtttcagtcatgtccctgcacatgacaaaaaagagctctcttacagggcccgggagattttcagtaaattcctgtgcagcaaagccaccactcctgtcaacattgacagccaggcccagctggcagacgatattctcaatgcaccccaccccgacatgttcaaggaacagcagctccagattttcaacctgatgaagtttgacagctatactcgatttctgaaatcccagctgtaccaagaatgcgtcctggcagaggtggaggggcgtaccctcccggactcccagcaggtccccagcagcccagcttccaagcacagcatcagctctgaccactccaatgtatccacaccgaaaaagttaagtggaaaatcaaaatcaggacgatccctgaatgaagatgttggggaagaggatagtgagaaaaagcgcaaaggggcctttttctcttggtcaaggagcaggagcacggggcgatcccagaagaagaaggaccatggtgatcatgcccatgatgcccttcatgccaatggaggactctgccgtcgggagtcccaaggctctgtctcttctgcggggagcctagacctgtcagaggcctgtaggacctcagcactcgagagagataaggctgccaaacactgctgtgtccacctcccagacgggacatcctgtgtggttgctgtcaagtccgggttttccatcaaagagatcctgtctggattgtgtgaacggcatggcatcaatggggctgctgtggacctcttcctggtgggcggagacaagcctctggtgctgcatcaggacagcagcatcctggccaccagggacctacggttgggaaagcgtactttgtttcggctggatctcgttccaattaaccggtcagtgggactcaaggccaagcccaccaagccagtcacggaagtgttgcggcccgtggtggccaagtacggcctggatctgggtagcctgctggtgaggctgagtggggagaaggagcccctggaccttggtgcccctatatcaagtctggatggacagcgggtcatcctagaggagagggatccttctagagggaaagtgtccacagagaaacagaaaggtgctcctgtcaaacaaagctcagctgtgaactccagccccagaaaccactcggctatgggagaggagagaacactaggcaagtctaactctattaaaataagaggagaaaatggaaaaagtgctagggatccccggctttcaaagagagaagaatctattgcaaagattgggaaaaaaaaatatcagaaaattaatttggacgaagcagaggagttttttgagctcatttccaaagctcagagcaacagagccgatgaccagcgtgggctgctaagaaaggaagacctggtactgcctgagtttcttcgcttacctcctggttcctcagaacttgccctgtccagcccacccccagtcaagggctttagcaagagagcggttacaagccatggccaggagggagcagttcagacagaggagagctacagcgacagcccagctaccagccctgcctcagcccagagcccctgctcagcctacagccctggctccgcccacagccccggctctgcccacagccctggctccgcccacagcacccctgggcctcctgggaccgcccaacctggagagaagcctacaaagccctcctgcatctccacagttcaagagggcactacacaggcctggaggaggctatcaccagaactggaggctgggggcatccagactgtggaggaggagcaggtggctgacctgaccctgatgggggagggggacatcagcagccccaacagcacgctgctaccaccaccaccccttccccaagacacaccaggacctacaagaccaggtacctccaggttctgactctacacccttgatctgtcctgctgactgcccatggcctgctccacctcatgttaataaagggaacactgagcaggcagccctgctttacttctgtgctttgacatgtcctgagagacagcctccttctctcatatttatggggcctcctttgccttttctgaaaggaaagcaggtggcagccaaggctcagtgtcccagggagagggtcactgaggctcagatagacagaccacgttgagctggtcctgtgaaggtgccatgggaatggtgacccacatccagtgactccttgtgaaggcttgggtctctgagtgtggatctcacctttaaaacctgcttgctgccactttagtgttttagactcaagatggaaagagaaaatagtatttgttttgagcaaatcagcaagggtcccatgctgacaaggatcaggctgtcagggtcagcctctctctccagccaggacttgctgactgccctccataggcaagccttgcacttgcactaggcagtgttcaccgactggcctcaacagtgtccaggcatttctcttagtggaagcatgaagtccagtgtgtgtggatgcgagcagtgtgagcgagtggtagggatgctactctcgtcccacctaagacactccctatcccacacgggtgacagggctcccgcgtgctcagtgtcctcacagtgacagtgatgagcctttcagtgcatgctgcctgttgttcctgtctaggccttggctgtgatatgcagcaggcaatgtgggtgctctgggtcctgcttcctgggcctggcggtgtcgggcctcatgcatgtttcatgtactctcacacaccatgggctggacttcacagccccacccgtggggatacactcgatgaggaggcacaggcaccatgaagcggccctgcgtgcatgcttgggcacctctgtcaggccacaccctcctttctgctcctttgtagctgcctgtttacagttctatctgtgttctgactctgtttttccaagagaaataaactttagagctcgaaaaaaaaaaaaaaaaaaaaaaaaaaaaaa

SEQ ID NO: 2404 - protein, 1387 aa, Rattus norvegicus
  ref <308>: DATABASE ACCESSION NUMBER: Refseq / NP_062212
  ref <309>: DATABASE ENTRY DATE: 2003-01-14
MYRAGEPGKRQSGPAPPRVRSVEVARGRAGYGFTLSGQAPCVLSCVMRGSPADFVGLRAGDQILAINEINVKKASHEDVVKLIGKCSGVLRMVISEGSSHVEPSSSDEEGGLCEGKGWLRPKLDSKALGINRAERVVEEVQSGGIFNMIFESPSLCASGSEPLKLKQRSLSESAALRLDVGQDSLCTPHPSMLSKEEISKVINDDSVFTVGLDNHDDFGLDASILNVAMVVGYLGSIELPSTSSNLEHDSLQAIRGCMRRLRAEQKIHSLVTMKVMHDCVQLVTDRAGVVAEYPAEKLAFSAVCPDDRRFFGLVTMQTNDDGCLAQEDEGALRTSCHVFMVDPDLFHHKIHQGIARRFGFACTADPDTSGCLEFPASSLPVLQFISVLYRDMGELIEGVRARAFLDGDADAHQNNSTSSNSDSGIGNFNQEEKSNRVLVVDLGGGSSRHGQGSSPGWESVSGRGSQPWSAPWNGTFCHDSEAGSPLETSPNTDRFWDLTKHSGPVFHMEVPPATLRSSIPPSKRGATGSSCGFNQRWLPVHVLQEWQCGHASDQESYTDSTDGWSSVNCGTLPPPMSKIPADRYRVEGSFAQAPLSTQKRDWSRKAFGMQNLFGPHRNVRKTKEDKKSSKLGRGVALAQTSQRTSARRSFGRSRRFSLTRSLDDLESATVSDGELTGADLKDCISNNSLSSNASLPSVQSCRRLRERRVASWAVSFERLLQDPVGVRYFSDFLRKEFSEENILFWQACECFSHVPAHDKKELSYRAREIFSKFLCSKATTPVNIDSQAQLADDILNAPHPDMFKEQQLQIFNLMKFDSYTRFLKSQLYQECVLAEVEGRTLPDSQQVPSSPASKHSISSDHSNVSTPKKLSGKSKSGRSLNEDVGEEDSEKKRKGAFFSWSRSRSTGRSQKKKDHGDHAHDALHANGGLCRRESQGSVSSAGSLDLSEACRTSALERDKAAKHCCVHLPDGTSCVVAVKSGFSIKEILSGLCERHGINGAAVDLFLVGGDKPLVLHQDSSILATRDLRLGKRTLFRLDLVPINRSVGLKAKPTKPVTEVLRPVVAKYGLDLGSLLVRLSGEKEPLDLGAPISSLDGQRVILEERDPSRGKVSTEKQKGAPVKQSSAVNSSPRNHSAMGEERTLGKSNSIKIRGENGKSARDPRLSKREESIAKIGKKKYQKINLDEAEEFFELISKAQSNRADDQRGLLRKEDLVLPEFLRLPPGSSELALSSPPPVKGFSKRAVTSHGQEGAVQTEESYSDSPATSPASAQSPCSAYSPGSAHSPGSAHSPGSAHSTPGPPGTAQPGEKPTKPSCISTVQEGTTQAWRRLSPELEAGGIQTVEEEQVADLTLMGEGDISSPNSTLLPPPPLPQDTPGPTRPGTSRF

SEQ ID NO: 2405 - DNA, 3279 bp, Rattus norvegicus
  ref <308>: DATABASE ACCESSION NUMBER: Refseq / NM_013047
  ref <309>: DATABASE ENTRY DATE: 2003-01-25
gcggccgcgtgagggtttagagaaactgccgctctgaagcctgaacctctgctcagtgatcttcctgccagagggactggacaagatttcttctgcatgattggaaacttggacctattagcacgtcatctacccagagaagcaggcagcgtgacagagtgaagaggggaaggaactactgcagaaacaagcaaacagcacaaaaggtggaggctggaaagatgttttagaaagtctctgtgtcagagaagcttcaagccactgaagatggagaatgaaaccgtcagtgaactgaaccaaaccgagctcccgccgcaagtagccgtggccctcgagtaccaggtggtcaccatcttacttgtggtggttatctgtggactgggcattgtgggcaacatcatggtagtcctggtggtcatgagaacgaagcacatgagaaccgctacaaactgctacctggtgagtctggctgtggcggatctcatggtcctggtggctgcaggcctccccaacatcaccgacagcatctatggttcctgggtctatggctatgttggctgcctctgcatcacgtatctccagtacttaggaattaacgcatcttcatgctcaataacagcctttaccattgagaggtacatagcaatctgccaccccatcaaagcccagtttctgtgcacattttccagagccaaaaaaatcattatctttgtctgggcctttacatccatttactgtatgctgtggttcttccttctggatctcaatatcagcacctacaaagatgctattgtgatatcctgtggctacaagatctcccgcaactactactcacctatttacctaatggactttggcgtcttttatgtcatgccaatgatcctggccactgtgctttacgggtttatagctagaatcctcttcttaaaccccattccttcagaccctaaagaaaactctaagacgtggaaaaatgactcaacccatcagaacaagaatatgaatttaaacaccaccaacagatgtttcaacagcaccgtttcttccaggaagcaggtcaccaagatgcttgcagtggttgtaattctgtttgcccttttatggatgccctacaggactcttgtggttgtcaactcatttctctccagccctttccaggaaaattggttcttgctcttttgcagaatttgcatttatctcaacagtgccatcaacccggtgatttacaacctcatgtctcagaagtttcgtgcagccttcaggaagctctgcaattgcaagcagaagcccactgagaaagctgctaactacagtgtggccctaaattacagtgtcatcaaggagtcagaccgctttagcacagagctagatgacatcaccgtcactgacacgtatgtgtcaaccacaaaagtatcatttgatgacacctgcttggcctccgagaagaatggacccagttcttgtacatatggatattctttgactgccaaacaggagaaaatatgaacttcctcaagaataccttgggctggtattaataaaggaaatctttcaaaaaattcaatgtgactcaaaaagatccaactgatcgaaggtcttcattcagaagtcagtaagaacatcgtgatacttaaatggtacagggtggcacaataaggaagcaaacatctaatccctagccatgaggacaagccactcctgttttgatatatatatatacaaattactggcatgcttttccttaatgtgtctctctttctcaaaataactgttatttgccagatgactctgaacacatcctggaaaccaatttgttctgagcctccacatatgtccttcaatacccttgaataccaaataattctgaataggcaagttaaacagaaaatcccatggaggacaagttcatttcatgtttgtatccaagaaattgaactaagatgctgagctcaacattgactttctcttgaatgaatgaacgaacgaacgaaagaatgaatgaacatgaataagtaaatttatgaatctccaactaagaaatataacgtaaaatcttcatgatgcctgatttcctcatagatttgtttacaaatataaaacttgtttgccttttgtttttatcatcttaaaccattctcttggcttattaaaatgtactatattttgtcagatcatggtcaccaccatctctgtgtatatattatgaatacaaagttcaatagtactctcaaatctctcacctaatttaataatgatcaagattattacatgtatgttcagagaataacaacatactatcactgacatgtgaataaaattaaatgtgcagagtacatggtaggaagagaagttatatgatttcagattacaaaccttagaattcctcattgggaaaagaatatcaggggggtgctagagtaattagaacaacctcataggaaagcttgaatttcttataagaatagacttggcttagataggaaaagacaagtgatgtaaggaaagagaggtgagtaagggtaggaggaaaagaaacaaactctaggtgtaatggataatgtgtccagttaagtgtgactcattggggattgatcaaggcaagcaactagaagaaaggaaagaagggaaataaagtatttcctgattattgtatttgttgaggaaatagtcagccagacaggtggtagatgtgtatattagtaagctgtcatgtattttctaaacattgtaaatttcacttatatctataaaaatgtagtatgctatttgtctcctaagtgttataattctgtaagtatcctaaagttcataatttccaggtaaaaactaattgtatatgtgtatatcttttctatattgcactgttatcatatatgggatatatttatttatgaatatgattcagaggtccttaacagccataagttatccagttatgctcaccagtagagatccaagctagctcataggcccttcatatgcctaagcatccatattaaatgagaaactgataagcagtgacaagcttctaatgccctcaccctgttgacttcgatgctgcttatatcgtgctcctgaatgcttggtttcttacaacatgcctctgaatgttttggtttccttttaccatttgtagagagctgtatactcactcatctcattgcttggagatcaatcattgtgtccgtgtggaaaaataatctcctttaagaaagtgcagtattatgtgttctctctgcaatgggaaactattactgtatgtgtatgcatggcggccgc

SEQ ID NO: 2406 - protein, 412 aa, Rattus norvegicus
  ref <308>: DATABASE ACCESSION NUMBER: Refseq / NP_037179
  ref <309>: DATABASE ENTRY DATE: 2003-01-25
MENETVSELNQTELPPQVAVALEYQVVTILLVVVICGLGIVGNIMVVLVVMRTKHMRTATNCYLVSLAVADLMVLVAAGLPNITDSIYGSWVYGYVGCLCITYLQYLGINASSCSITAFTIERYIAICHPIKAQFLCTFSRAKKIIIFVWAFTSIYCMLWFFLLDLNISTYKDAIVISCGYKISRNYYSPIYLMDFGVFYVMPMILATVLYGFIARILFLNPIPSDPKENSKTWKNDSTHQNKNMNLNTTNRCFNSTVSSRKQVTKMLAVVVILFALLWMPYRTLVVVNSFLSSPFQENWFLLFCRICIYLNSAINPVIYNLMSQKFRAAFRKLCNCKQKPTEKAANYSVALNYSVIKESDRFSTELDDITVTDTYVSTTKVSFDDTCLASEKNGPSSCTYGYSLTAKQEKI

SEQ ID NO: 2407 - DNA, 499 bp, Rattus norvegicus
  ref <308>: DATABASE ACCESSION NUMBER: EMBL / AA849035
  ref <309>: DATABASE ENTRY DATE: 2000-03-03
atatactttaagatttcttttttttaaacaaatacaaatctgataaggggagtgagggaggatggcaagcttaaaaaagaaaagggggaagggagggttctcttatgcccagaatttgaggccgttatcatggctgaagcttacagtccaaagccccggtgctgtgcgctcaggtgttgcaggtgcagtctggaggcgtagcaggctccacgtcggcggccgggctcacgctggcgccttctttgcgcacagcctggtaggggtccagcttggacaccagcttggcggaggccgagaagccgttccacatacagtcctgcagaatgatgttcttcacgaaggtctcgtcgtccgggtcgcagacgaagctctgcttcaccgcgtctcctggcagctcgggcagatctgcggtggagaagctatcaccgtcgtgatccctgggggagaaagaagcggcgaccgcttcgcagggaggcgagtagaggcccgggtggcccgg

SEQ ID NO: 2408 - DNA, 433 bp, Rattus norvegicus
  ref <308>: DATABASE ACCESSION NUMBER: EMBL / AI639507
  ref <309>: DATABASE ENTRY DATE: 2000-03-04
ccagtaactacagacaagcacagtggtgcttggctgtgatcctaacacacagaggatcaggctcatggtcaggggctgaagagatgggtcagtgcttaagagcagtggctgctcttccagacctaggttcaactcccagcaccctcacggtagcttgcgacagtttattactgcatttccaggggctctgatgccctcttctgaccactttgtccaccaggtatgcacacaatacacagacctacatgcaggcaaaacactcatgaacatgaaataaaccttaggaagaacgttaatgccagagctcggaatatagttgagtgtgtttgcctagcattaaaaagctgagggtttgggggctggggatttagctcagtggtagagcgcttacctaggaagcgcaaggccctgggttcggtccccagctccggaa

SEQ ID NO: 2409 - DNA, 379 bp, Rattus norvegicus
  ref <308>: DATABASE ACCESSION NUMBER: EMBL / AA893022
  ref <309>: DATABASE ENTRY DATE: 2000-03-03
caaactcaagtggtgcttcaagggcagagagccaatgcttctcttcccttcgctccctcagaggacgagcctaagacttggatgatttgaatccaagggcaacgaacaggcactgctggccaatgagagttcttaacagcacatcacccgccagcaggcctctagccaaaggaaatatggcatggctctgaggcagtcatctacctagccagccaagtcttacctcacagggaggctgtgaggattagcgtctaatacccatgaacatgcctgggggcagtgctagccaaggggaagcactccgcacagttttccacatgtaaacaaacattatctgtgataataaaacttgagttcgacataaatgtctagcccacgg

SEQ ID NO: 2410 - DNA, 1228 bp, Homo sapiens
  ref <308>: DATABASE ACCESSION NUMBER: Refseq / NM_015696
  ref <309>: DATABASE ENTRY DATE: 2002-12-15
ctctttgccctcgcgacgccgccacctccggaacaagccatggtggcggcgacggtggcagcggcgtggctgctcctgtgggctgcggcctgcgcgcagcaggagcaggacttctacgacttcaaggcggtcaacatccggggcaaactggtgtcgctggagaagtaccgcggatcggtgtccctggtggtgaatgtggccagcgagtgcggcttcacagaccagcactaccgagccctgcagcagctgcagcgagacctgggcccccaccactttaacgtgctcgccttcccctgcaaccagtttggccaacaggagcctgacagcaacaaggagattgagagctttgcccgccgcacctacagtgtctcattccccatgtttagcaagattgcagtcaccggtactggtgcccatcctgccttcaagtacctggcccagacttctgggaaggagcccacctggaacttctggaagtacctagtagccccagatggaaaggtggtaggggcttgggacccaactgtgtcagtggaggaggtcagaccccagatcacagcgctcgtgaggaagctcatcctactgaagcgagaagacttataaccaccgcgtctcctcctccaccacctcatcccgcccacctgtgtggggctgaccaatgcaaactcaaatggtgcttcaaagggagagacccactgactctccttcctttactcttatgccattggtcccatcattcttgtgggggaaaaattctagtattttgattatttgaatcttacagcaacaaataggaactcctggccaatgagagctcttgaccagtgaatcaccagccgatacgaacgtcttgccaacaaaaatgtgtggcaaatagaagtatatcaagcaataatctcccacccaaggcttctgtaaactgggaccaatgattacctcatagggctgttgtgaggattaggatgaaatacctgtgaaagtgcctaggcagtgccagccaaataggaggcattcaatgaacattttttgcatataaaccaaaaaataacttgttatcaataaaaacttgcatccaacatgaatttccagccgatgataatccaggccaaaggtttagttgttgttatttcctctgtattattttcttcattacaaaagaaatgcaagttcattgtaacaatccaaacaatacctcacgatataaaataaaaatgaaagtatcctcctc

SEQ ID NO: 2411 - protein, 187 aa, Homo sapiens
  ref <308>: DATABASE ACCESSION NUMBER: Refseq / NP_056511
  ref <309>: DATABASE ENTRY DATE: 2002-12-15
MVAATVAAAWLLLWAAACAQQEQDFYDFKAVNIRGKLVSLEKYRGSVSLVVNVASECGFTDQHYRALQQLQRDLGPHHFNVLAFPCNQFGQQEPDSNKEIESFARRTYSVSFPMFSKIAVTGTGAHPAFKYLAQTSGKEPTWNFWKYLVAPDGKVVGAWDPTVSVEEVRPQITALVRKLILLKREDL

SEQ ID NO: 2412 - DNA, 516 bp, Rattus norvegicus
  ref <308>: DATABASE ACCESSION NUMBER: EMBL / AA957218
  ref <309>: DATABASE ENTRY DATE: 2000-03-03
gcattttggagaggaagtgttcgatgaaatcgtggggagtcatggcggccaggttccatttgagcttgttcaccagaagcagttccatttgcagcaactcctcggggcggatagagttgtcagtgtagatgcacaacttctcggcagtcaggggaatggtctccttcatcttagaggccacgaacatgcaggtggcccccagaagctgcaggcggctcttcttcaggggctccagagacaagaaacggtccaggtagttcatggccagcgggaagacctcctcttcgcacttctgctcctcgcagacctctagcatccaggtggccacgattttccgcatggatggcacaatctccctctgcacgcacttgaagtaagaaacggagggcgcgcaggtctcctcagtcttaagcatggctcgcagcacccggtcgttgaggagattggtgtcagggtacgcgcggcggatggtctccacttcgcagcacaggagctggtgttccatggcgtggccgc

SEQ ID NO: 2413 - DNA, 698 bp, Rattus norvegicus; identical to SEQ ID NO: 812
  ref <308>: DATABASE ACCESSION NUMBER: Refseq / NM_031318
  ref <309>: DATABASE ENTRY DATE: 2003-01-13

SEQ ID NO: 2414 - protein, 113 aa, Rattus norvegicus; identical to SEQ ID NO: 813
  ref <308>: DATABASE ACCESSION NUMBER: Refseq / NP_112608
  ref <309>: DATABASE ENTRY DATE: 2003-01-13

SEQ ID NO: 2415 - DNA, 713 bp, Homo sapiens; identical to SEQ ID NO: 814
  ref <308>: DATABASE ACCESSION NUMBER: Refseq / NM_006519
  ref <309>: DATABASE ENTRY DATE: 2000-11-01

SEQ ID NO: 2416 - protein, 113 aa, Homo sapiens; identical to SEQ ID NO: 815
  ref <308>: DATABASE ACCESSION NUMBER: Refseq / NP_006510
  ref <309>: DATABASE ENTRY DATE: 2000-11-01

SEQ ID NO: 2417 - DNA, 2537 bp, Rattus norvegicus
  ref <308>: DATABASE ACCESSION NUMBER: EMBL / M90514
  ref <309>: DATABASE ENTRY DATE: 2002-08-09
gaattcaccattggtcacactatgttttggcctgtgtgttctgggtcgccgggccctgggaacagcctcacacagtatgtctgccaggtgagtgcccacagcctgctgttctccctctgcctttccctgaagagctccacatgacctcctctcacttggatgagactcttagcagtcctgaccgaccttgcctgctcttgcactgctctgtgaggaagagtttggcttccttggcaagacagggaatggccccttctggctctctccccattgctgatgtcttctccccacccagcctggagcccttcctctatggcctgcatgccctgttcaagggggacttccgcatcacctcccctcgtgatgagtgggtctttgcggacatggacctgcttcaccgagtggtggcccctggggttcgcatggccctcaagcttcaccaggatcatttcacatctcctgatgagtatgaggaaccagcagccctgtatgatgccattgcagccaatgaggaacggctagtcatctcacatgagggggaccctgcctggcgcacggccatccttagcaacacaccttccctgctggcactgcgccacgtcatggacgatgcttctgatgagtacaagatcatcatgctcaaccggcgtcacctcagcttccgagtcatcaaggtggagccgatggtctcactccatcctgcagcccaggcccctcctcagtgtccctgccctgacttttggtgtggccctccacaggtaaaccgagagtgcgtgcgtgggctgtgggctggacagcagcaagagctggtgttcctgcgcaaccgcaaccctgagcgaggcagcatccagaacgccaagcaggcactccgcaacatgatcaattcctcctgtgaccagccgctgggctaccccatctatgtgtcaccgcttaccacatctctggctggtagccacccccaactgcgggcgctgtggggaggtcctgtcagcctgggtgccattgcccgatggctcttgcgcagctgggagaggtgagccctggctgtcaccctagcttgggaacctttatgaggcctgatcctctggggttcagggagcagggcacagaggtgaagcagctctctccaaggtcacagaaatgaagtcgagtcaatgagcttgcatcctgagagatgaccctctccccagagggatccccttccccctagagtgggctgtagtgtttaaaagattataaactaggtagcaaaatctctcaggagatgagacccctaggattcaggtgttagatgtttctgtagggctcagaatgcctctgccctggacccctcccacttctcccgcttctccacccagacttcataagggctgtggcgcgggctgtaacagcggtgggaatgtggatgactcggactgtgctgggggtggcggcctgacctccctcagcaataacccccccttggcacaccctacgcctgagaatacagcaggtgagtaggcaaagctgggctgaacctgtgggttagactgtagcccagctgaggtctttgttcttatctctgtcctacaggcagcagtgaacagcccctcccaccaggtcctagctggggccacggccttccctcagtggctctggtgatgggcggccccctcctctgctgcagtggcctccccctcggctccctggaccaccacctgcttcacctgctcccactgagggtccccggccctcaagacctcctgggccctggtctcctcaattctgaggggcccagtgggaagtggagtctggggggtcggaagggactgggaggacctgatggggagccagcctcagggagccccaaaggaggcacccccaaatctcaggtaagggacctgtggaaggagtggaccctaggagttctcatgtcggtttgtctgctcatccctcgtcttctcttccataggcccctctagacctcagcctcagtcctgatgtcagctctgaggcctcacccgccagaacaacccaggacattccttgcttggacagcagtgttcctgagagttgcacacctccggcgctccaggtgactggcctgtccctgttgaggaacgagagagtccagccgccagcccttgctggaacatcagtactgagtagctgtcctctgctggatctcatcccaggactcaatatcgcagactctgctggaccacaggactgattggctttggctctggtgtctgcaccctgatatctggctactccagtgtcagaactgagtgaaccagacttctccctgatccgtggcctggatgccccaaattgagcagcagcctcctagccaggccataagagccaaacccatgggctggtccctctttgagcccatggtcaggactgactttgccctaggccttgcactgcctacaaggctggcctccttagcctggcctggggcctgacacgtggcaagggtgggttcattcgttcttttgtcatttttctttcctttttttctgtgcttcagagacaccaaattaataaca

SEQ ID NO: 2418 - DNA, 1044 bp, Rattus norvegicus
  ref <308>: DATABASE ACCESSION NUMBER: Refseq / NM_012582
  ref <309>: DATABASE ENTRY DATE: 2003-01-14
atgagagccctgggagctgtcgtcactctcctgctctggggtcagctttttgctgtggaattgggcaatgatgccacagacattgaagatgacagctgcccaaagcccccagagattgcaaacggctatgtggaacacttggttcgttatcgctgccgacagttctacaaactacagaccgaaggagatggaatctacaccttaaacagtgagaagcaatgggtgaacccagctgctggcgataaactccccaagtgtgaggcagtgtgtgggaagcccaagcatcctgtggaccaggtacagcgcatcatcggtggttccatggacgccaaaggcagctttccttggcaggccaagatgatctccagacatggactcaccactggggccacactgatcagtgaccagtggctgctgaccactgcccaaaacctcttcctgaatcacagtgagaatgcgacagccaaggacattgcccctaccttaacactctatgtggggaaaaaccagctggtggagattgagaaggtagttctccaccccgagcgctctgtggtggatatcgggctgatcaagctcaaacagaaagtgcttgtcactgagaaagtcatgcctatctgcctgccttccaaagactacgtagcgccaggccgcatgctatgtgtccggttgggggcgcggaatgtcaactttagatttactgaacgtctcaagtatgtcatgctgcctgtggctgaccaggagaagtgtgagctgcactatgagaaaagcacagtgcctgagaagaaaggcgctgtaactcctgttggggtacagcccatcttgaataagcataccttctgtgctggccttaccaagtatgaggaagacacttgctatggtgacgctggcagtgcctttgccgtccatgacacggaggaggacacctggtatgcagctgggatcctgagctttgacaagagttgtgccgtagctgagtatggtgtgtatgtgaaggcaactgatctgaaggactgggtccaggaaacaatggccaagaactag

SEQ ID NO: 2419 - protein, 347 aa, Rattus norvegicus
  ref <308>: DATABASE ACCESSION NUMBER: Refseq / NP_036714
  ref <309>: DATABASE ENTRY DATE: 2003-01-14
MRALGAVVTLLLWGQLFAVELGNDATDIEDDSCPKPPEIANGYVEHLVRYRCRQFYKLQTEGDGIYTLNSEKQWVNPAAGDKLPKCEAVCGKPKHPVDQVQRIIGGSMDAKGSFPWQAKMISRHGLTTGATLISDQWLLTTAQNLFLNHSENATAKDIAPTLTLYVGKNQLVEIEKVVLHPERSVVDIGLIKLKQKVLVTEKVMPICLPSKDYVAPGRMLCVRLGARNVNFRFTERLKYVMLPVADQEKCELHYEKSTVPEKKGAVTPVGVQPILNKHTFCAGLTKYEEDTCYGDAGSAFAVHDTEEDTWYAAGILSFDKSCAVAEYGVYVKATDLKDWVQETMAKN

SEQ ID NO: 2420 - DNA, 1047 bp, Homo sapiens
  ref <308>: DATABASE ACCESSION NUMBER: Refseq / NM_020995
  ref <309>: DATABASE ENTRY DATE: 2002-10-11
atgagtgacctgggagctgtcatttccctcctgctctggggacgacagctttttgcactgtactcaggcaatgatgtcacggatatttcagatgaccgcttcccgaagccccctgagattgcaaatggctatgtggagcacttgtttcgctaccagtgtaagaactactacagactgcgcacagaaggagatggagtatacaccttaaatgataagaagcagtggataaataaggctgttggagataaacttcctgaatgtgaagcagtatgtgggaagcccaagaatccggcaaacccagtgcagcggatcctgggtggacacctggatgccaaaggcagctttccctggcaggctaagatggtttcccaccataatctcaccacaggggccacgctgatcaatgaacaatggctgctgaccacggctaaaaatctcttcctgaaccattcagaaaatgcaacagcgaaagacattgcccctactttaacactctatgtggggaaaaagcagcttgtagagattgagaaggtggttctacaccctaactaccaccaggtagatattgggctcatcaaactcaaacagaaggtgcttgttaatgagagagtgatgcccatctgcctaccttcaaagaattatgcagaagtagggcgtgtgggttacgtgtctggctggggacaaagtgacaactttaaacttactgaccatctgaagtatgtcatgctgcctgtggctgaccaatacgattgcataacgcattatgaaggcagcacatgccccaaatggaaggcaccgaagagccctgtaggggtgcagcccatactgaacgaacacaccttctgtgtcggcatgtctaagtaccaggaagacacctgctatggcgatgcgggcagtgcctttgccgttcacgacctggaggaggacacctggtacgcggctgggatcctaagctttgataagagctgtgctgtggctgagtatggtgtgtatgtgaaggtgacttccatccaggactgggttcagaagaccatagctgagaactaa

SEQ ID NO: 2421 - protein, 348 aa, Homo sapiens
  ref <308>: DATABASE ACCESSION NUMBER: Refseq / NP_066275
  ref <309>: DATABASE ENTRY DATE: 2002-10-11
MSDLGAVISLLLWGRQLFALYSGNDVTDISDDRFPKPPEIANGYVEHLFRYQCKNYYRLRTEGDGVYTLNDKKQWINKAVGDKLPECEAVCGKPKNPANPVQRILGGHLDAKGSFPWQAKMVSHHNLTTGATLINEQWLLTTAKNLFLNHSENATAKDIAPTLTLYVGKKQLVEIEKVVLHPNYHQVDIGLIKLKQKVLVNERVMPICLPSKNYAEVGRVGYVSGWGQSDNFKLTDHLKYVMLPVADQYDCITHYEGSTCPKWKAPKSPVGVQPILNEHTFCVGMSKYQEDTCYGDAGSAFAVHDLEEDTWYAAGILSFDKSCAVAEYGVYVKVTSIQDWVQKTIAEN

SEQ ID NO: 2422 - DNA, 1920 bp, Rattus norvegicus
  ref <308>: DATABASE ACCESSION NUMBER: Refseq / NM_016999
  ref <309>: DATABASE ENTRY DATE: 2003-01-14
ccatggtcctcaatttcctctccccgagcctttcccggctcggcttgtgggcttctgtagtgatcctgatggtaatcgttctcaagctcttcagcctgctgcttcggaggcagaagctggccagggctatggacagtttcccagggccccccacacactggctttttggtcatgcccttgagatccagaagttagggagcctggacaaggtggtatcctgggcccaacagttcccccatgcccacccactttggtttggacaattcgttggtttcctgaacatctatgagcccgactatgcgaaagctgtatacagccgcggggatccgaaggctgcagatgtgtatgacttcttcctccagtggatcgggaaaggcctactagttctggatgggccaaaatggttccagcaccgcaagctgctcacacctggcttccattatgatgtgctgaagccctatgtggccatatttgctgagtccacacgtatgatgctggacaagtgggagaaaaaggctagtgaaaataagagctttgacatcttctgtgacgtaggccacatggccctggacaccctcatgaagtgcaccttcggcaaaggagacagcggcctaggccacagagacaacagctactacctggcggtcagtgacctcacactgctgatgcagcagcgcatcgactccttccagtaccataatgacttcatttactggctcactccacatggccgccgcttcctgcgggcctgcaagatagcccatgaccatacagatgaggtcatcaggcagcggaaggcagcactgcaggatgagaaagagcggaaaaagattcagcagcggaggcacctggacttcctggacattctcctgggtgtccgggatgaaagtgggatcaagctgtcagatgcagagctccgggctgaagtggacacattcatgtttgaaggccatgacaccaccactagtggtatctcttggtttctctactgcatggccctttaccctgagcaccagcagctatgtagggaggaggtccgtgggatcctaggagaccaagactccttccaatgggatgatctggccaagatgacctacctgaccatgtgcatgaaggagtgcttccgcctctacccacctgtaccccaagtataccgccagctcaacaagccagtcaccttcgtggatggccgctctctacctgcaggcagcctgatctctctgcacatctacgccctccacaggaacagtactgtgtggcctgatccagaggtctttgacccactgcgcttttctcctgagaatgctgcaggacggcatccctttgccttcatgcctttttctgcagggcccaggaattgcatcgggcagcagtttgccatgaacgagatgaaggtggtcacagccctttgtttactgcgctttgagttctccctggatccctcaaagatgcccattaaggtcccccagctgatcttgcgctccaaaaatggtatccacctctacctgaagccgctggcttctaggtctggaaagtaggtcttcagagaactaggcctgggcagcacaagccgtgactcttcctgggatgttgccctcctagatagaatgtggagtcatcatggatccctgcctgtgggaggctttggaggcaaaagcatggacactgacagtctcctggaagacattctcttgtaaacatgtgtgtggaatgattcaacgcccaggctccagaacttatttcttcactccacaacatttgctgaacgttttgctgccttgagaaactccattgatttcacatagctacatttatttaaccatcttggtgtgtatttggaatacgatggacatgaggaaaattgctcaaactaaaactgtacaaaataaataatactttaaaaagcaaactcccaccacc

SEQ ID NO: 2423 - protein, 511 aa, Rattus norvegicus
  ref <308>: DATABASE ACCESSION NUMBER: Refseq / NP_058695
  ref <309>: DATABASE ENTRY DATE: 2003-01-14
MVLNFLSPSLSRLGLWASVVILMVIVLKLFSLLLRRQKLARAMDSFPGPPTHWLFGHALEIQKLGSLDKVVSWAQQFPHAHPLWFGQFVGFLNIYEPDYAKAVYSRGDPKAADVYDFFLQWIGKGLLVLDGPKWFQHRKLLTPGFHYDVLKPYVAIFAESTRMMLDKWEKKASENKSFDIFCDVGHMALDTLMKCTFGKGDSGLGHRDNSYYLAVSDLTLLMQQRIDSFQYHNDFIYWLTPHGRRFLRACKIAHDHTDEVIRQRKAALQDEKERKKIQQRRHLDFLDILLGVRDESGIKLSDAELRAEVDTFMFEGHDTTTSGISWFLYCMALYPEHQQLCREEVRGILGDQDSFQWDDLAKMTYLTMCMKECFRLYPPVPQVYRQLNKPVTFVDGRSLPAGSLISLHIYALHRNSTVWPDPEVFDPLRFSPENAAGRHPFAFMPFSAGPRNCIGQQFAMNEMKVVTALCLLRFEFSLDPSKMPIKVPQLILRSKNGIHLYLKPLASRSGK

SEQ ID NO: 2424 - DNA, 537 bp, Rattus norvegicus
  ref <308>: DATABASE ACCESSION NUMBER: EMBL / S78284
  ref <309>: DATABASE ENTRY DATE: 2000-03-04
gcccatctctattataaaaatgtctcagagcaaccgggagctggtggttgactttctctcctacaagctctcccagaaaggatacagctggagtcagtttagcgatgtcgaagagaacaggactgaagccccagaagaaactgaaccagaaagggagacccccagtgccatcaatggcaacccatcctggcacctggcggatagccccgcggtgaatggagccactggccacagcagcagtttggatgcgcgggaggtactccccatggcagcagtgaagcaagcgctgagagaggctggcgatgagtttgaactgcggtaccggagagcattcagtgatctaacatcccagcttcatataaccccagggacagtatatcagagctttgaacaggacacttttgtggatctctacgggaacaatacagcacccgagagccggaaaggccaggagcgtttcaaccgctggttcctgacgggcatgactgtggctggtgtagttctgctgggctcactcttcagtcggaagtgaccaga

SEQ ID NO: 2425 - DNA, 431 bp, Rattus norvegicus
  ref <308>: DATABASE ACCESSION NUMBER: Refseq / NM_013042
  ref <309>: DATABASE ENTRY DATE: 2003-01-14
gaagtttgcgtgctgccatggagaccagagccttctggacaaccctgctgctggtcctggttgctgggtcctcctgcaaagcccaggaatttgttggcctatctccaagccaatgtatggctccaacaaatgtcagggtggactgtaactaccccactgtcacatcagagcagtgtaacaaccgtggttgctgttttgactccagcatcccaaatgtgccctggtgcttcaaacctctgcaagagacagaatgtacattttgaagctgtccaggctccaggaagggagctccacaccctggactcttgctgatggtagtggcccagggtaacactcacccctgatctgctccctcgcgccggccaatataggagctgggagtccagaagaataaagaccttacagtcagcacaaggctgttctaattgcgg

SEQ ID NO: 2426 - protein, 81 aa, Rattus norvegicus
  ref <308>: DATABASE ACCESSION NUMBER: Refseq / NP_037174
  ref <309>: DATABASE ENTRY DATE: 2003-01-14
METRAFWTTLLLVLVAGSSCKAQEFVGLSPSQCMAPTNVRVDCNYPTVTSEQCNNRGCCFDSSIPNVPWCFKPLQETECTF

SEQ ID NO: 2427 - DNA, 4142 bp, Rattus norvegicus
  ref <308>: DATABASE ACCESSION NUMBER: Refseq / NM_012544
  ref <309>: DATABASE ENTRY DATE: 2003-01-14
cgccgcaccgcgcgcaccgcgccatgggggccgcgtccggccagcgggggcggtggccgttgtcaccgccgctcttgatgctgtcgctgctgctgctgctgctgctgccgccgtcgcccgccccggcgcttgaccctggattgcagccgggcaacttttccgcggacgaggcaggggcgcagctcttcgctgacagctataactcgagtgccgaggtggtgatgttccagagcaccgcagccagctgggcgcacgacaccaacatcacggaggagaatgcgcggctccaggaggaagcggccctgatcaaccaggagtttgcagaggtctggggcaagaaggccaaggagctgtatgagtccatctggcagaacttcactgaccaaaagctgcgaaggatcatcggatccgtacagaccctaggacctgccaacctgcccctgacccagcggctgcagtacaactctctgctaagcaacatgagcagaatctactccaccggcaaggtctgcttccccaacaagactgccacctgctggtccctggacccagagctcaccaacatcctggcttcctcacgaaactatgccaaggtgctgtttgcctgggaaggctggcatgatgctgtgggtatcccactgaagcccctctatcaggactttactgccctcagtaatgaagcctacagacaagatggcttctcagacacaggagcctactggcgctcctggtatgagtccccctcctttgaagagagtttggagcatctctaccaccaagtcgagcccctctacctgaacctccatgcctttgtccgtcgcgcactgcaccgccgctatggggacaaatacatcaatctcagaggtcctattcccgctcatctgctgggagacatgtgggcgcagagctgggagaacatttacgacatggtagtgcctttcccggacaaacccaacctcgatgtcaccagtacaatggtacagaagggctggaatgccacgcacatgttccgggtcgcagaggaattctttacctcgctggggctctcccccatgcctccagagttctgggcggagtcgatgctggagaaaccagctgatggacgggaggtggtgtgccatgcctctgcgtgggacttctacaacaggaaggacttcaggattaagcagtgcacgcgggtcacgatggaccagctgtccacagtacaccacgagatgggccacgtgcagtactatctccagtacaaggacctgcacgtctctctgcgtcgaggtgccaaccctggcttccacgaggccatcggggatgtactcgctctctctgtctctaccccagcacatctgcacaaaattggcctgctagaccgtgttgccaatgacatagaaagtgacatcaattacttgctaaagatggccctagagaaaattgccttcttgccctttggttacctggtggaccagtggcgctggggggtcttcagtggacgtaccccaccctctcgctacaactacgactggtggtatcttcgaaccaagtatcaggggatctgcccaccagttgctcggaatgaaacccattttgacgctggggccaagtttcacatcccaagcgtgacaccatacatcaggtactttgtgagtttcgtgctacagttccagttccatcaagcgctgtgcaaggaggcaggccaccagggtccactacaccagtgtgacatctaccagtccaccaaggcaggggccaagctccaacaggtgctgcaggctggctgctccaggccctggcaggaggtgctgaaggacctggtgggttcagatgcgctggatgccagtgcgctaatggagtacttccaaccagtaagccagtggctgcaggagcagaatcagcggaatggcgaggtcctaggctggccggagtatcagtggcgtccaccgttaccagacaactatccagagggaattgacctagagactgatgaagccaaggctaacaggttcgtggaggagtatgaccggacagccaaggtgttgtggaacgaatacgcagaggccaactggcattataacaccaacattaccatagagggcagcaagatcctgcttcagaaaaacaaggaagtgtccaaccataccttgaaatatggcacctgggccaagacatttgacgtgagcaacttccagaactctaccatcaagcggatcataaagaaggttcagaacgtggaccgggcagtgctgcctcccaacgagttagaagagtacaaccagatcctgctagacatggagacgacttacagtgtagccaatgtttgctacacaaatggcacttgtctgtcactggagcctgatctgacaaatataatggccacgtcccggaaatacgaagaattgctttgggtgtggaagagctggcgagacaaggtggggagagccatccttccctttttcccaaagtacgtggacttctccaacaagatcgccaagctcaacggctactctgatgcaggggattcctggagatcctcatatgagtccgacgacttggagcaagacctggaaaaactataccaggagctgcagccgctctacctgaacctgcatgcctatgtgcgccgctccctgcaccgccattatgggtctgagtacatcaacctggatggtcccattcctgctcacctgctagggaacatgtgggcacagacttggtccaacatctatgacttggtggcacccttcccttccgcccccagtatagatgccacggaggccatgataaagcagggatggacacccagaaggatatttaaggaagctgacaatttttttacctccctggggctgttacctgtgccccctgagttctggaacaagtcaatgttagagaagccaaccgatgggagggaggtggtgtgccatgcctcagcctgggacttctacaacggcaaggacttcaggatcaagcagtgtacctctgtgaacatggaggaattggtgatagcccaccacgaaatgggccacatccagtatttcatgcagtacaaagacttgcctgtgacctttcgggagggcgccaaccccggttttcatgaggctattggagatgttttggctctgtctgtgtctacacccaagcatctacacagtctcaacctgctcagcagtgagggcagtggctacgagcatgacatcaactttctaatgaagatggcccttgacaagatcgccttcatccccttcagctacctcattgaccagtggcgctggagggtctttgacggaagcatcaccaaggagaactacaaccaggagtggtggagtctcagactgaagtaccagggtctctgccctccagtgcctagatcccaaggtgactttgacccagggtccaagttccacgttcctgcgaatgtgccatacatcaggtactttatcagcttcatcatccagttccagttccacgaggcactatgtcgcgcagccgggcacaccggccccctgtacaagtgtgatatctaccaatccaaggaagcagggaagctgctggcagatgccatgaagttgggctacagtaagcagtggccagaagccatgaagataatcacaggccaacctaacatgtcagcctctgccattatgaattacttcaagccactgactgaatggctcgtcacagagaacaggagacatggagagacactgggctggccggagtacacctggacaccaaacacggctcgtgcagaaggctccctcccagagtccagtcgcgtcaacttcctgggtatgtacctggaaccacagcaggcccgtgtgggccagtgggtgctgctcttcctaggcgtcgccctgctggtggccaccgtgggtctcgcccaccgactctacaacatccataaccatcacagcctccgccggccccaccgtgggccccagtttgggtccgaggtggagctcagacactcctgaggtgaccctgccgtcaaggccaacagaggagtgtcccattaaaaaaaaattagatgggggacatggtgtttgagtggaacatacccaagctgggccttcttcctttgctgttcccatccactctgccccccagcccagcccccattctctagatacccagcatctaacctggaattc

SEQ ID NO: 2428 - protein, 1313 aa, Rattus norvegicus
  ref <308>: DATABASE ACCESSION NUMBER: Refseq / NP_036676
  ref <309>: DATABASE ENTRY DATE: 2003-01-14
MGAASGQRGRWPLSPPLLMLSLLLLLLLPPSPAPALDPGLQPGNFSADEAGAQLFADSYNSSAEVVMFQSTAASWAHDTNITEENARLQEEAALINQEFAEVWGKKAKELYESIWQNFTDQKLRRIIGSVQTLGPANLPLTQRLQYNSLLSNMSRIYSTGKVCFPNKTATCWSLDPELTNILASSRNYAKVLFAWEGWHDAVGIPLKPLYQDFTALSNEAYRQDGFSDTGAYWRSWYESPSFEESLEHLYHQVEPLYLNLHAFVRRALHRRYGDKYINLRGPIPAHLLGDMWAQSWENIYDMVVPFPDKPNLDVTSTMVQKGWNATHMFRVAEEFFTSLGLSPMPPEFWAESMLEKPADGREVVCHASAWDFYNRKDFRIKQCTRVTMDQLSTVHHEMGHVQYYLQYKDLHVSLRRGANPGFHEAIGDVLALSVSTPAHLHKIGLLDRVANDIESDINYLLKMALEKIAFLPFGYLVDQWRWGVFSGRTPPSRYNYDWWYLRTKYQGICPPVARNETHFDAGAKFHIPSVTPYIRYFVSFVLQFQFHQALCKEAGHQGPLHQCDIYQSTKAGAKLQQVLQAGCSRPWQEVLKDLVGSDALDASALMEYFQPVSQWLQEQNQRNGEVLGWPEYQWRPPLPDNYPEGIDLETDEAKANRFVEEYDRTAKVLWNEYAEANWHYNTNITIEGSKILLQKNKEVSNHTLKYGTWAKTFDVSNFQNSTIKRIIKKVQNVDRAVLPPNELEEYNQILLDMETTYSVANVCYTNGTCLSLEPDLTNIMATSRKYEELLWVWKSWRDKVGRAILPFFPKYVDFSNKIAKLNGYSDAGDSWRSSYESDDLEQDLEKLYQELQPLYLNLHAYVRRSLHRHYGSEYINLDGPIPAHLLGNMWAQTWSNIYDLVAPFPSAPSIDATEAMIKQGWTPRRIFKEADNFFTSLGLLPVPPEFWNKSMLEKPTDGREVVCHASAWDFYNGKDFRIKQCTSVNMEELVIAHHEMGHIQYFMQYKDLPVTFREGANPGFHEAIGDVLALSVSTPKHLHSLNLLSSEGSGYEHDINFLMKMALDKIAFIPFSYLIDQWRWRVFDGSITKENYNQEWWSLRLKYQGLCPPVPRSQGDFDPGSKFHVPANVPYIRYFISFIIQFQFHEALCRAAGHTGPLYKCDIYQSKEAGKLLADAMKLGYSKQWPEAMKIITGQPNMSASAIMNYFKPLTEWLVTENRRHGETLGWPEYTWTPNTARAEGSLPESSRVNFLGMYLEPQQARVGQWVLLFLGVALLVATVGLAHRLYNIHNHHSLRRPHRGPQFGSEVELRHS

SEQ ID NO: 2429 - DNA, 989 bp, Rattus norvegicus
  ref <308>: DATABASE ACCESSION NUMBER: Refseq / NM_031777
  ref <309>: DATABASE ENTRY DATE: 2003-01-13
atgaaggggcagcagaaaacagctgaaaccgaagaggggacagtgcagattcaggaaggtgcagtggctactggagaggacccaactagtgtagctatcgccagcatccaatcagctgccactttccccgaccccaacgtcaagtacgtcttccgaactgagaatgggggccaggtgatgtacagggtgatccaggtgtctgaggggcagctggatggccagacagagggctctggcgctatcagtggctaccctgccactcagtctatgactcaggcagtaatccagggggctttcaccagtgatgatgctgttgacgcggagggaacagctgccgagacccactacacttacttccccagcaccgcagtgggagatgggtcagggggtacgacatctgggagtacaaccgccgtggtcaccacccagggctcagaggcactgctggggcaggcaaccccgcccagcacaggccaattctttgtgatgatgtcaccacaagaagtgttacagggagggagccagcggtcaattgcccccaggacccacccttattccccgaagtcagaggctcccaggacaacgcgagatgagaaacggagggctcaacataacgaagtggagcgccgccgccgggacaagatcaacaactggattgtacagctgtccaaaatcatcccagactgctctatggagagcaccaagtctggccagagtaagggtggaatcctgtccaaagcctgtgactatatccaggaactacgtcagagcaaccaccggctgtctgaagagctgcaggggttagatcagttgcagctcgacaatgacgtgcttcgacagcaggtggaagatcttaaaaacaagaacctgctactacgagctcagttacggcaccacggattagaggtcgtcatcaagaatgacagcaactaactgtggggactcaggggctttgggcccgagaactgcacatagcccagtagccactg

SEQ ID NO: 2430 - protein, 310 aa, Rattus norvegicus
  ref <308>: DATABASE ACCESSION NUMBER: Refseq / NP_113965
  ref <309>: DATABASE ENTRY DATE: 2003-01-13
MKGQQKTAETEEGTVQIQEGAVATGEDPTSVAIASIQSAATFPDPNVKYVFRTENGGQVMYRVIQVSEGQLDGQTEGSGAISGYPATQSMTQAVIQGAFTSDDAVDAEGTAAETHYTYFPSTAVGDGSGGTTSGSTTAVVTTQGSEALLGQATPPSTGQFFVMMSPQEVLQGGSQRSIAPRTHPYSPKSEAPRTTRDEKRRAQHNEVERRRRDKINNWIVQLSKIIPDCSMESTKSGQSKGGILSKACDYIQELRQSNHRLSEELQGLDQLQLDNDVLRQQVEDLKNKNLLLRAQLRHHGLEVVIKNDSN

SEQ ID NO: 2431 - DNA, 516 bp, Rattus norvegicus
  ref <308>: DATABASE ACCESSION NUMBER: EMBL / AA874896
  ref <309>: DATABASE ENTRY DATE: 2000-03-03
gactgagtctgacgagtcacctcataagaactccagatcctcatcttcagaggaggcctcccaggggaaggatgaaggacattcatcctcgaaaaggtcagaagattctagaaacagaaacgctgatgaggaagacagtgcttcagactctgagctctggaagggtccactgccagagacagatgaaaagtcacaggaagaagaatttgatgattattttcaggatttgtttctgtgacctgggagagagaaccttgtttatttcttggtgaggaaacgtacgcagacactcaatgaccgtgtccatgctgttgagtccggacagcactgggacagatacttcagaggcacgggacgtttcagacattttctccttccctggtgtggcttctcagtagctcatctaacacctgtttgggctctagctctctggcatatgacaaacttgtttcaagtgtcattgaatgtggagtgattggctttaagctgtaaataaattgcttagcttcttattct

SEQ ID NO: 2432 - DNA, 2400 bp, Homo sapiens
  ref <308>: DATABASE ACCESSION NUMBER: Refseq / NM_145246
  ref <309>: DATABASE ENTRY DATE: 2002-12-23
acccgtagggagaggcgggttgcgggcggcggcggcggcggcggcggcggtggtggttgtggcgaggctgtgcggcagggcgcacgggacctgtcctgcagcggctctctcaggccgtgggtcgtcgctgcagctgccgggaaagaaggaaacgacgactccgggggcgaacttggcacacagggaggaagggaaaggatgcatggtcatggaggctatgattctgattttagtgatgatgaacgctgtggagaatccagcaaaaggaaaaaaaggacagttgaagatgacttactgctccaaaaaccatttcagaaagaaaaacatggaaaggtggcccataaacaagttgcagcagaattgctggatagggaagaagcaagaaatagaaggtttcatctcatagctatggatgcttatcaaagacatacaaagttcgtaaatgactatattttatactatggtggcaaaaaagaagacttcaagcgtttgggggaaaatgacaagacagacttggatgttatacgagaaaatcatagattcctatggaatgaggaggacgaaatggacatgacttgggagaagagacttgctaagaaatactatgataaattatttaaggaatactgcatagcagatctcagtaaatataaagaaaataagtttggatttaggtggcgagtagaaaaagaagtaatttcaggaaaaggtcaatttttctgtggaaataaatattgtgataaaaaagaaggcttaaagagttgggaagttaattttggttatattgagcatggtgagaagagaaatgcacttgttaaattaaggttatgccaagaatgttccattaaattaaatttccatcacaggagaaaagaaatcaagtcaaaaaaaagaaaagataaaaccaaaaaagactgtgaagagtcatcacataaaaaatccagattatcttctgcagaagaggcctccaagaaaaaagataaaggacattcatcttcaaagaaatctgaagattctctacttagaaactctgatgaggaagaaagtgcttcagaatctgaactttggaagggtccactaccagagacagatgaaaaatcacaggaagaagaatttgatgagtattttcaggatttgtttctatgagacgagagagagaagcctccgctccttaatgtgaaacttcatgaagttttaaacttcatgcaatttgaaattccatataagtttttatctgcaagttacagcttgtgtggtttgtctttggaaataaaaatccaggttctctcagaatgtcagaggctttggaagttcattagttcaattaaagactttcctgtcctttaaatatcttttcaattgcttatctacaattctgttttatttatagctcctagaggatagagctggacagattccattgttcctacattttgtaggttttttttcactgccttcattatgtatcttctcttgccttcattattttattttattatttcttctttttctcttttttagagccaccaatactggatttgtttgtttttcatttttttcttttgtagaaacggagtcctcctgtgttgcccaggctggtattcaaactcctggccttatgcattcctcccaccctggcctcccagagtgctgggattacaggtgtgagccaccatgctctgccaattattttaaattactaggattaaagtatattatgtatgtctttaacttctttctttcccattgataaactggcacccttcttttaagtacctgctctcccattaccacctatttccagctgctttttgaggttttttgcttgcctgtctcttgcttccttcttaacctctaccacttaagagagtttgttataatcaaatttgacttcctagcctgtggataatttactattaagtaaattattaccacagggagccagtgaggtcccagtagtctaaaacagttcatgtgttcacaaaaattgcctccccggcagagattatgcagtaagataatttaactgaataatactatgtgcatgtatcttgcctcagatatactcatgcaaatatgaatatacctctgatatggtttggctctgtgtccccacccaaatctcatcttgaatgtgtactcccataattcccacattttataggagggatccagtgagagataatttgaatcaagggggcggtttcccccatattgttcttgtggtagtgaataagtctcacaagatctgatggttttatcaggggcttctgcttttgcatccttctcattttcttttgctgctgccatgtaagaagtgccttttgcctcccaccatgattctgaggctttcccagccatgtggaactgtaagtccaattaaacctctttttcttcccc

SEQ ID NO: 2433 - protein, 315 aa, Homo sapiens
  ref <308>: DATABASE ACCESSION NUMBER: Refseq / NP_660289
  ref <309>: DATABASE ENTRY DATE: 2002-12-23
MHGHGGYDSDFSDDERCGESSKRKKRTVEDDLLLQKPFQKEKHGKVAHKQVAAELLDREEARNRRFHLIAMDAYQRHTKFVNDYILYYGGKKEDFKRLGENDKTDLDVIRENHRFLWNEEDEMDMTWEKRLAKKYYDKLFKEYCIADLSKYKENKFGFRWRVEKEVISGKGQFFCGNKYCDKKEGLKSWEVNFGYIEHGEKRNALVKLRLCQECSIKLNFHHRRKEIKSKKRKDKTKKDCEESSHKKSRLSSAEEASKKKDKGHSSSKKSEDSLLRNSDEEESASESELWKGPLPETDEKSQEEEFDEYFQDLFL

SEQ ID NO: 2434 - DNA, 570 bp, Rattus norvegicus
  ref <308>: DATABASE ACCESSION NUMBER: EMBL / AI172097
  ref <309>: DATABASE ENTRY DATE: 2000-03-03
gaatagaaccgccgactcaggaaagcagctggtgcactacacggctcagcttctgttcctgttggaccctgatgctgtggacacagggagcagtgaactgcctgtgctctttgagctgggggagagctcctacttctctgagggagatgactacacggatgatcccaccatctctcttctgacgggcactgaaccccacaaagccaaggaccccactgtctcctagaggtttcagttgtcaggctggcttgggcctggcccccagcctattcctaggacacggctggtctggggagacaagacagttgggtagtccagggaatcctaggtcaagccagcacaaccccagtggagcacagatgggacttgggcttgggcagtaccttggatcaagaggaagatcctgaaggctgcatacctgctgccttcaccccagccccaagtctgctctctgggtcagagcttcacagccacacttggactgaccctgcaggttgttcataaaattgtattttggatttttacatgagagtcccctttaacccttcacaaataaatatatatatacat

SEQ ID NO: 2435 - DNA, 2156 bp, Homo sapiens
  ref <308>: DATABASE ACCESSION NUMBER: Refseq / NM_005526
  ref <309>: DATABASE ENTRY DATE: 2000-11-01
cgggcccgttgcaagatggcggcggccatgctgggccccggggctgtgtgtgcgcagcgggcggcggcgcggcccggaaggctggcgcggcgacggcgttagcccggccctcggcccctctttgcggccgctccctccgcctattccctccttgctcgagatggatctgcccgtgggccccggcgcggcggggcccagcaacgtcccggccttcctgaccaagctgtggaccctcgtgagcgacccggacaccgacgcgctcatctgctggagcccgagcgggaacagcttccacgtgttcgaccagggccagtttgccaaggaggtgctgcccaagtacttcaagcacaacaacatggccagcttcgtgcggcagctcaacatgtatggcttccggaaagtggtccacatcgagcagggcggcctggtcaagccagagagagacgacacggagttccagcacccatgcttcctgcgtggccaggagcagctccttgagaacatcaagaggaaagtgaccagtgtgtccaccctgaagagtgaagacataaagatccgccaggacagcgtcaccaagctgctgacggacgtgcagctgatgaaggggaagcaggagtgcatggactccaagctcctggccatgaagcatgagaatgaggctctgtggcgggaggtggccagccttcggcagaagcatgcccagcaacagaaagtcgtcaacaagctcattcagttcctgatctcactggtgcagtcaaaccggatcctgggggtgaagagaaagatccccctgatgctgaacgacagtggctcagcacattccatgcccaagtatagccggcagttctccctggagcacgtccacggctcgggcccctactcggccccctccccagcctacagcagctccagcctctacgcccctgatgctgtggccagctctggacccatcatctccgacatcaccgagctggctcctgccagccccatggcctcccccggcgggagcatagacgagaggcccctatccagcagccccctggtgcgtgtcaaggaggagccccccagcccgcctcagagcccccgggtagaggaggcgagtcccgggcgcccatcttccgtggacaccctcttgtccccgaccgccctcattgactccatcctgcgggagagtgaacctgcccccgcctccgtcacagccctcacggacgccaggggccacacggacaccgagggccggcctccctcccccccgcccacctccacccctgaaaagtgcctcagcgtagcctgcctggacaagaatgagctcagtgaccacttggatgctatggactccaacctggataacctgcagaccatgctgagcagccacggcttcagcgtggacaccagtgccctgctggacctgttcagcccctcggtgaccgtgcccgacatgagcctgcctgaccttgacagcagcctggccagtatccaagagctcctgtctccccaggagccccccaggcctcccgaggcagagaacagcagcccggattcagggaagcagctggtgcactacacagcgcagccgctgttcctgctggaccccggctccgtggacaccgggagcaacgacctgccggtgctgtttgagctgggagagggctcctacttctccgaaggggacggcttcgccgaggaccccaccatctccctgctgacaggctcggagcctcccaaagccaaggaccccactgtctcctagaggccccggaggagctgggccagccgcccacccccacccccagtgcagggctggtcttggggaggcagggcagcctcgcggtcttgggcactggtgggtcggccgccatagccccagtaggacaaacgggctcgggtctgggcagcacctctggtcaggagggtcaccctggcctgccagtctgccttcccccaaccccgtgtcctgtggtttggttggggcttcacagccacacctggactgaccctgcaggttgttcatagtcagaattgtattttggatttttacacaactgtcccgttccccgctccacagagatacacagatatatacacacagtggatggacggacaagacaggcagagatctataaacagacaggctctaaaaaaaaaaaaaaaaaaaa

SEQ ID NO: 2436 - protein, 529 aa, Homo sapiens
  ref <308>: DATABASE ACCESSION NUMBER: Refseq / NP_005517
  ref <309>: DATABASE ENTRY DATE: 2000-11-01
MDLPVGPGAAGPSNVPAFLTKLWTLVSDPDTDALICWSPSGNSFHVFDQGQFAKEVLPKYFKHNNMASFVRQLNMYGFRKVVHIEQGGLVKPERDDTEFQHPCFLRGQEQLLENIKRKVTSVSTLKSEDIKIRQDSVTKLLTDVQLMKGKQECMDSKLLAMKHENEALWREVASLRQKHAQQQKVVNKLIQFLISLVQSNRILGVKRKIPLMLNDSGSAHSMPKYSRQFSLEHVHGSGPYSAPSPAYSSSSLYAPDAVASSGPIISDITELAPASPMASPGGSIDERPLSSSPLVRVKEEPPSPPQSPRVEEASPGRPSSVDTLLSPTALIDSILRESEPAPASVTALTDARGHTDTEGRPPSPPPTSTPEKCLSVACLDKNELSDHLDAMDSNLDNLQTMLSSHGFSVDTSALLDLFSPSVTVPDMSLPDLDSSLASIQELLSPQEPPRPPEAENSSPDSGKQLVHYTAQPLFLLDPGSVDTGSNDLPVLFELGEGSYFSEGDGFAEDPTISLLTGSEPPKAKDPTVS

SEQ ID NO: 2437 - DNA, 2157 bp, Rattus norvegicus
  ref <308>: DATABASE ACCESSION NUMBER: Refseq / NM_019210
  ref <309>: DATABASE ENTRY DATE: 2003-01-14
tttacttttatgctcaccatctgattggcctaggagctgtgaaatcagctgcaactgaaaatgtctgacagcttggataacgaagaaaaacctccagctcccccactgaggatgaacagtaacaaccgagattcttcagcactcaaccacagctccaaaccactgcccatggccccggaagagaagaataagaaagccaggcttcgctctatcttcccaggaggaggggataaaaccaataagaagaaagagaaagaacgcccagagatctctcttccttcagactttgagcatacgattcatgtgggttttgatgcagtcaccggggaattcactggaattcctgaacaatgggctcgactgctccaaacctccaacattacaaaactggaacagaagaagaacccacaggctgttctggatgttctcaagttttacgactccaaagaaacagtcaacaaccagaaatacatgagctttacatcaggagataaaagtgcccatggatatatagcagcacatcagtcgaataccaaaacagcttcagaacctcctttggctcctcctgtatctgaagaagaggatgaagaagaggaagaggaagaagatgataatgagcccccgcctgtcattgcaccaagaccagagcatacaaaatcaatctatactcgttctgtggttgagtcaattgcttcaccagcagcaccaaataaagaagccaccccaccttctgctgagaatgccaattccagtactttgtacaggaatacagatcggcaaagaaaaaaatccaagatgacagatgaggagatcctagagaagctaagaagcattgtgagtgttggggacccaaagaagaaatatacaagatttgaaaaaattggccaaggggcatcaggaactgtttacacagcactagacattgcgacaggacaagaggtggctataaagcaaatgaaccttcaacagcagcccaaaaaggaattaattattaatgaaattcttgtcatgagggaaaataagaaccccaatattgtcaattatttagatagctacttagtgggtgatgaactgtgggtagtcatggaatacttggctggtggctctttgactgacgtggtcacagaaacctgtatggatgaaggacagatagcagccgtctgtagagagtgcctccaagctttggatttcttgcactcaaaccaagtgatccacagagatataaagagtgacaatattctcctcgggatggatggttctgttaaactgactgattttggattctgtgcccaaatcactcctgagcaaagtaaacgaagcactatggtgggaactccctattggatggcacctgaggtggtaactcgaaaagcttatggcccgaaagttgatatctggtctctgggaatcatggccattgaaatggtggaaggtgaacccccttaccttaatgaaaatccactcagggccttatatctgatagccactaatggaaccccagagctccagaatcccgagagactgtcagctgtattccgtgacttcttaaatcgctgtcttgagatggatgtggatagacgagggtctgccaaggagcttttgcagcatccatttttaaaattagccaagcccctgtccagcctcactcctctgattcttgctgcaaaggaagccattaagaacagtagccgttagaagtgcaagccttacccctcaccgtctcccggatgaagtaagactgaactaaaacgtctcctgcagggatccacagaagaaaagacagtcaaatggagtgggggttctttaactttcaagtgaatagaaacttcttataaacctttttcctactccctcagattatgtaatttatttgtaagcctgaaccgcagcccacacaggccagcaatgtcgaagtagccattaagtggccacttccaccgtgaagcgagagagccagtagtcaatccctcattcgtgcatttactttgaagaaaagagatttctcaaagatgcacactccctcttcatagtgctgtgtgtttttaagttagagagtagtcccccttccattcaaacctctttcaaaatcccttacccaacgtgatgttttttcacttgcattgtcttagatgtccagaaaaaaacgatatcaagctt

SEQ ID NO: 2438 - protein, 544 aa, Rattus norvegicus
  ref <308>: DATABASE ACCESSION NUMBER: Refseq / NP_062083
  ref <309>: DATABASE ENTRY DATE: 2003-01-14
MSDSLDNEEKPPAPPLRMNSNNRDSSALNHSSKPLPMAPEEKNKKARLRSIFPGGGDKTNKKKEKERPEISLPSDFEHTIHVGFDAVTGEFTGIPEQWARLLQTSNITKLEQKKNPQAVLDVLKFYDSKETVNNQKYMSFTSGDKSAHGYIAAHQSNTKTASEPPLAPPVSEEEDEEEEEEEDDNEPPPVIAPRPEHTKSIYTRSVVESIASPAAPNKEATPPSAENANSSTLYRNTDRQRKKSKMTDEEILEKLRSIVSVGDPKKKYTRFEKIGQGASGTVYTALDIATGQEVAIKQMNLQQQPKKELIINEILVMRENKNPNIVNYLDSYLVGDELWVVMEYLAGGSLTDVVTETCMDEGQIAAVCRECLQALDFLHSNQVIHRDIKSDNILLGMDGSVKLTDFGFCAQITPEQSKRSTMVGTPYWMAPEVVTRKAYGPKVDIWSLGIMAIEMVEGEPPYLNENPLRALYLIATNGTPELQNPERLSAVFRDFLNRCLEMDVDRRGSAKELLQHPFLKLAKPLSSLTPLILAAKEAIKNSSR

SEQ ID NO: 2439 - DNA, 1635 bp, Homo sapiens
  ref <308>: DATABASE ACCESSION NUMBER: Refseq / NM_002578
  ref <309>: DATABASE ENTRY DATE: 2002-11-05
atgtctgacggtctggataatgaagagaaacccccggctcctccactgaggatgaatagtaacaaccgggattcttcagcactcaaccacagctccaaaccacttcccatggcccctgaagagaagaataagaaagccaggcttcgctctatcttcccaggaggaggggataaaaccaataagaagaaggagaaagagcgcccagagatctctcttccttcagactttgagcatacgattcatgtggggtttgatgcagtcaccggggaattcactggaattccagagcaatgggcacgattactccaaacttccaacataacaaaattggaacagaagaagaacccacaagctgttctagatgttctcaaattctatgattccaaagaaacagtcaacaaccagaaatacatgagctttacatcaggagataaaagtgcacatggatacatagcagcccatccttcgagtacaaaaacagcatctgagcctccattggcccctcctgtgtctgaagaagaagatgaagaggaagaagaagaagaagatgaaaatgagccaccaccagttatcgcaccaagaccagagcatacaaaatcaatctatactcgttctgtggttgaatccattgcttcaccagcagtaccaaataaagaggtcacaccaccctctgctgaaaatgccaattccagtactttgtacaggaacacagatcggcaaagaaaaaaatccaagatgacagatgaggagatcttagagaagctaagaagcattgtgagtgttggggacccaaagaaaaaatacacaagatttgaaaaaattggtcaaggggcatcaggtactgtttatacagcactagacattgcaacaggacaagaggtggccataaagcagatgaaccttcaacagcaacccaagaaggaattaattattaatgaaattctggtcatgagggaaaataagaaccctaatattgttaattatttagatagctacttggtgggtgatgaactatgggtagtcatggaatacttggctggtggctctctgactgatgtggtcacagagacctgtatggatgaaggacagatagcagctgtctgcagagagtgcctgcaagctttggatttcctgcactcaaaccaggtgatccatagagatataaagagtgacaatattcttctcgggatggatggctctgttaaattgactgactttgggttctgtgcccagatcactcctgagcaaagtaaacgaagcactatggtgggaaccccatattggatggcacctgaggtggtgactcgaaaagcttatggtccgaaagttgatatctggtctcttggaattatggcaattgaaatggtggaaggtgaacccccttaccttaatgaaaatccactcagggcattgtatctgatagccactaatggaactccagagctccagaatcctgagagactgtcagctgtattccgtgactttttaaatcgctgtcttgagatggatgtggataggcgaggatctgccaaggagcttttgcagcatccatttttaaaattagccaagcctctctccagcctgactcctctgattatcgctgcaaaggaagcaattaagaacagcagccgctaa

SEQ ID NO: 2440 - protein, 544 aa, Homo sapiens
  ref <308>: DATABASE ACCESSION NUMBER: Refseq / NP_002569
  ref <309>: DATABASE ENTRY DATE: 2002-11-05
MSDGLDNEEKPPAPPLRMNSNNRDSSALNHSSKPLPMAPEEKNKKARLRSIFPGGGDKTNKKKEKERPEISLPSDFEHTIHVGFDAVTGEFTGIPEQWARLLQTSNITKLEQKKNPQAVLDVLKFYDSKETVNNQKYMSFTSGDKSAHGYIAAHPSSTKTASEPPLAPPVSEEEDEEEEEEEDENEPPPVIAPRPEHTKSIYTRSVVESIASPAVPNKEVTPPSAENANSSTLYRNTDRQRKKSKMTDEEILEKLRSIVSVGDPKKKYTRFEKIGQGASGTVYTALDIATGQEVAIKQMNLQQQPKKELIINEILVMRENKNPNIVNYLDSYLVGDELWVVMEYLAGGSLTDVVTETCMDEGQIAAVCRECLQALDFLHSNQVIHRDIKSDNILLGMDGSVKLTDFGFCAQITPEQSKRSTMVGTPYWMAPEVVTRKAYGPKVDIWSLGIMAIEMVEGEPPYLNENPLRALYLIATNGTPELQNPERLSAVFRDFLNRCLEMDVDRRGSAKELLQHPFLKLAKPLSSLTPLIIAAKEAIKNSSR

SEQ ID NO: 2441 - DNA, 1136 bp, Rattus norvegicus
  ref <308>: DATABASE ACCESSION NUMBER: EMBL / S49003
  ref <309>: DATABASE ENTRY DATE: 2000-03-03
gcggtctagggagcggcggcactggcagaagcggctgttacagcggcggtggcggcgacggctgttgctgagccccggcagccgcgaggaccccgggctggggccacgcgggcctgaggctcggctccagcagcccccaagcggacgaacccgcgctctgtctcccaaggcgaagtccgaggtctcaggtatggatctttggcgggtgttcttaaccctggcactggcagtctccagcgacatgtttcctggaagtggggctacaccagctactcttggcaaagcttccccggttctgcaaagaattaatccaagcctgagggaaagttcctctggaaagcctcgattcaccaagtgtcgttcccctgaactggagaccttttcatgctactggacagaaggggatgatcataatttaaaggtcccgggatctattcagctatactatgctagaagaattgctcatgaatggaccccggaatggaaagaatgccctgattatgtctctgctggagcaaacagctgttacttcaactcatcgtatacctccatttggataccctactgcattaagcttactacaaatggtgatttgttggacgaaaagtgtttcactgttgatgaaatagtgcaacctgatccgcccattggcctcaactggactttactaaacatcagtttgcctgggatccgtggagatatccaagtgagttggcagccaccgcccagtgccgatgttctgaagggatggataattctggagtatgaaattcagtacaaagaagtaaatgaaacaaaatggaaaacgatgagcccgatatggtcaacatcagtcccactgtactcactgagactggataaagagcacgaagtgcgtgtgagatccagacaacggagcttcgaaaagtacagcgagttcagtgaagtactccgtgtaacgtttcctcagatggacacactggcagcatgtgaagaaggacccaagttcaattcccagcacccacatcaagagattgacaaccacctgtaacaccagctccagaggatctgccatccctagccttgcgggcacctgcattcatatgcacatacatgcatacacataattaaaattaataaaataaaattttaaaaat

SEQ ID NO: 2442 - DNA, 7087 bp, Rattus norvegicus
  misc_feature (1)..(7087): n=a, c, g or t
  ref <308>: DATABASE ACCESSION NUMBER: Refseq / NM_031751
  ref <309>: DATABASE ENTRY DATE: 2003-01-13
ggccccacgatgacccacagccccgcgacaagcgaggacgaggaacgccacagtgccagcgagtgtcccgaggggggctcagaatcggacagctccccagacggaccaggaagaggcccccagggtactcggggccggggcagcggagcacctggtaacctggcctctacccgaggcctccagggacgctccatgtctgtccctgacgacgcccacttcagcatgatggttttcaggattggcatccctgacttgcaccagacgaaatgcctacgcttcaacccggatgctaccatctggacagccaaacagcaagtactctgtgccctgagcgagagtctacaggatgtgctaaactatggactgttccagccagccacctcaggccgggatgccaacttcctggaggaagagaggcttctaagagagtaccctcagtcctttgagaaaggggtaccctacctggagttccgctacaagacccgagtctacaaacagaccaacctggatgagaaacagctggccaaactgcacacgaagacggggttgaagaagttccttgaatatgtgcagctcgggacgtctgacaaggtggcgaggctgctggacaaggggctggaccccaattaccacgactcagattcaggagagacacctttgaccctggcggcccagactgaaggctcagtagaggtgattcggacgctgtgcctgggcggggcgcacatagacttcagggcccgggatggcatgacagcgctgcacaaagctgcatgtgctaggcactgcctggcactcacggcacttctggaccttgggggctcccccaactacaaggatcgacgagggctgacccccctgttccacacagctatggttgggggagacccccgctgttgtgagctacttctgtacaacagggcccagctgggcattgcagatgagaacggctggcaggaaatccaccaggcctgccaacgagggcactctcagcacctggaacacctgctcttctatggggctgagcctggagcccagaatgcctcaggaaacacggccctgcacatctgtgctctctacaacaaggagacctgtgccaggatcctcctttatcgcggagcaaacaaggatgtgaaaaataacaacggacagacacccttccaggtggctgtgattgctgggaattttgagctgggggaactgattcgtaaccatcgggaacaggatgtggtacccttccaggagtcccccaagtatgcagcccggcgtcggggacccccaggcgcagggctgactgtacccccagcgctgctgcgggctaacagcgacacgagcatggcgctgcctgattggatggtgttttcggccccaggggcctcatcctctgggacccctggccctacctcaggaccccagggccagtcacagccctcggcccccagcaccaagctcagtagtgggaccctcagaagtgccagcagcccccgaggtgcccgggcacgctccccatcccgggggagacatcctgaagatgccaagagacaacctcgaggccgacccagctccagcgggacaccccgagatgggccggctgggggaactgggggctcagggggccctgggggctccctgggtagcagaggcagacgtaggaagctctattcagcggtacctggacgctccttcatggcggtgaagtcataccaggcgcaaggcgagggggagatctctctgagtaaaggcgaaaagatcaaagtgctcagcatcggggaaggaggcttctgggaaggccaggtcaaaggtcgagttggctggttcccttctgactgcctagaagaggtggcaaaccgttcccaggagggaagacaagaaagccgaagtgacaaggcaaagagactcttcaggcattacacagtgggctcttacgacagcttcgatgccccaagtctgatcgatgggattgactcagggagtgattacatcatcaaggagaagacagtcttactgcagaagaaggacagtgaggggttcgggttcgtgctccggggggccaaggcgcagacccccatcgaggaattcacccccaccccggccttcccggcgctgcagtacctcgagtctgtggacgagggtggcgtggcatggcgggctggactacggatgggagacttcctcatcgaggtgaatggacagaatgtagtgaaggttggccaccgccaggtggtcaacatgatccgacagggaggcaacacactgatggtcaaggtggtgatggtgaccagacacccagacatggacgaggctgtccacaagaaagcatcccagcaggctaagcggctcccgcccccagccatctccctgcgttccaagtctatgacctcagagctggaggaaatggaatacgagcaacagcccgcggcagtgcccagcatggagaaaaagaggactgtgtatcagatggcactcaacaaactggatgagatcttggccgctgctcagcagaccatcagcgcaagtgagagtcctgggcctggtggcctggcatccctgggcaagcaccgacccaaaggattctttgccactgagtcgagctttgatcctcaccaccgctcccagccaagttatgaccggccttctttcctgcctcctggacccggccttatgctccggcagaaatctatcggggctgcggaagacgacagaccctacctagcacccccagccatgaaattcagtcgtagcctgtcagtccccggttcagaggacatacccccaccacccactacatcaccaccagagccgccctatagcacacctccggccccctcctcctccggccgcctcactccctcgcctcggggagggccctttaaccccagttctgggggtccccttcccgcctcctccccttcatctttcgatgggccatctcctcctgacacccgtggtgggggccgagaaaagagcctatatcacagcgcagccctgccccctgcccaccaccatccacctcatcaccaccatcatcacgcgccacctccccagccccaccatcaccatgcacatcctcctcacccaccggagatggagacaggaggttcccccgacgatcccccacctcgattggccctgggaccccagcccagccttcgaggctggcgaggtggaggacccagcccgacctcgggggccccatcaccttcccaccacagtagcagcggaggcagcagcggccctactcaggctcccgccctgcgntacttccaactgcccccgagggcggccagtgcggctatgtatgtaccagcacgttccggccgcggtcgcaagggcccactggtcaagcagaccaaagtggaaggcgagccccaaaagggcagcatcccttccgcgtcctctccaacatccccggcgttgcctcggtctgaaccacctccggccgggccgtcggagaaaaattccatccctatcccgaccatcatcatcaaagccccatctaccagtaacagcggccgcagcagtcagggaagcagcacagaggctgagccccccacccagcccgatggcgcgggcggcggcggatcctcgcctagccctgcacctgccacgtcccctgtgccgccatccccgtcgcccgtgcccactcccgcgtcacccagcggcccggccaccctggatttcactagccagtttggagcagccctagtaggcgcggcgcggagggagggaggctggcagaacgaagcccggcggcggtccacgctgttcctgtccaccgacgcaggagatgaggatggaggcgacagcgggctgggcccgggggggcccccgggtccccggctgcgccattccaaatccattgacgaaggcatgttttccgcagagccgtacctccggctggagtcagggggcagcagtgggggctacggggcctacgcagcgggcagccgagcctacgggggcagcgggagcagcagcgccttcaccagcttcctccccccgcggcccctggtgcatccgctgaccggcaaagccttggatcccgcctctccgctggggttggccttggccgcccgggagcgggccttgaaggagtcctcggagggtgggggcacccctcagccgcccccgagacctccatcaccacgctacgacgccccaccgcctacccttcaccaccactcgccccattcaccccattcgccacatgcgcgtcacgagccagtgttgcgcctctggggggaccccgcgcgccgggagctggggtaccgggcaggcctagggagtcaggagaaggcccttaccgccagtccacctgcagctcgccgctccctactgcaccgtctgcccccgacggctcccggggtcgggccgctcctgctgcagctggggccggagcccccaactccccatcctggggtgagcaaggcctggcgcacagcagccccggaggagccggagcggctgccgctgcacgtgcgattccttgagaattgccaagcccggcctcccccagctggcacgagagggtcctctactgaagatgggcctggggtcccgcctcccagccctcgcagagtcttgccaacctctcccacctccccacgaggcaacgaggagaacggccttccgctactggtcctgccaccgccagccccttcggtggatgtggacgacggcgagttcttgtttgcggagccgctgcctccacccctggagttttccaatagtttcgaaaagccagagtcgcctctcacacccgggcctcctcacccactacctgaccctccctccccggctacccctctacccgcagccccacctcccgctgtagccgcagcccctcccaccttggactccacagcatccagcctgacctcttacgacagcgaagtggccacactgacccagggggctcccgcggctcctggggatcctccagctccaggcccgccggccccggcagccccagctcccccagcaccgcagccaggccctgatcctccacctggcacagattctggaattgaggaggtggacagtcggagtagcagtgatcacccgctggagaccatcagcagcgcatccacactcagcagcttgtccgccgaaggaggaggcaatacagggggcgtggctgggggcggggccggggtggccaatgggacggagctcctggacacctacgttgcctacctggatggccaggccttcgggggcagtggaactcctggcccaccatatcctccccagctcatgactccttctaagctccggggcagggcgcttgggactagtggaaatttaagacctggtcccagtgggggactccgagatcctgtcacccccaccagccccactgtctctgtgaccggagctggaacagatgggctactggccttgagtgcttgccctggaccctcaacggcaggtgtggcagggggtcccgtggcagttgagccagaagtcccgcctgtacctttgcccgctgcctcatccctgcctcggaagctattaccgtgggaggagggtccgggaccaccaccaccacccctgccagggcccctgtcccagcctcaggcctctgccttggccacggtcaaagccagcatcatcagcgaactcagctccaagctccagcagtttggtgggtcctctaccgcaggaggagctctgccttgggctcggggaggcagcgggggcagcacagacagccaccacggaggagccagttacatcccagagaggacgtcctccctgcagcggcagaggctctctgaagactcccagacctctctcctctccaaacccagcagcagcatctttcagaactggcctaaaccccctctgccaccactccccactgggtctggggtctcctcttcaacagctgcagccccgggagctacatccccttcagcctcatctgcctcagcttccaccagacacctgcagggtgtggaatttgagatgcggcctccgctgctccgccgggcacccagcccctcgctgctgcctgcctcggatcacaaggtcagcccagcgcccaggccttcctctttgcccatcctgccttcaggacccatctacccgggcctcttcgacatccgtagctctccaaccggaggggcgggaggctcgactgaccccttcgctcccgtctttgtgccaccacaccccgggatatctgggggtcttggaggagccttgtctggggcctctcgctccctatcacccacccgcctgctctcgctgcccccggacaagccgttcggcgccaagcctctagggttctggaccaagtttgacgtcgccgattggctagagtggctgggcttgtcggagcaccgagcccagttcctggaccacgagattgatggctcccatctgcctgccttgaccaaggaggactatgtggacctgggtgtaaccagggtgggccaccgtatgaacattgaccgggctctcaaatttttcctggagaggtgatggctggcctggacggaccagcccgtccataggacccttgagcccgctgacctctgacctctgacccctctgaccatcattccccctctcccctcagggggccagggactctgctaaaactgtgtcctgccccgtctccccaagcctgactgaggtccccaggtggaccggatgcaggccagacaatggcacctcgcaagaggtgggcagctgacacaagactgcaagtggagtagatgggggattagaaaaaaatgacaaaggggtactgaagaaagagggaaaaaggctgactaggggtgggggaacagacagagccatagtgggtcagtccagagcctgacctgatggggtcctgggaaggtgtgccctccgattccatcatttgcgcctctcaaataacccttttcacctctctaggcccctcagccttcccactctccttggctcactcagctgcccagccccctgcctcttgcacgcctgttcccctccctggctgcagtttttgcacaagcttgccccctggctgtcttgcacacctccggcctgtaaggccctctcagcttcccaacacgctgcattcggtttaaaaaaa

SEQ ID NO: 2443 - protein, 2087 aa, Rattus norvegicus
  ref <308>: DATABASE ACCESSION NUMBER: Refseq / NP_113939
  ref <309>: DATABASE ENTRY DATE: 2003-01-13
MVFRIGIPDLHQTKCLRFNPDATIWTAKQQVLCALSESLQDVLNYGLFQPATSGRDANFLEEERLLREYPQSFEKGVPYLEFRYKTRVYKQTNLDEKQLAKLHTKTGLKKFLEYVQLGTSDKVARLLDKGLDPNYHDSDSGETPLTLAAQTEGSVEVIRTLCLGGAHIDFRARDGMTALHKAACARHCLALTALLDLGGSPNYKDRRGLTPLFHTAMVGGDPRCCELLLYNRAQLGIADENGWQEIHQACQRGHSQHLEHLLFYGAEPGAQNASGNTALHICALYNKETCARILLYRGANKDVKNNNGQTPFQVAVIAGNFELGELIRNHREQDVVPFQESPKYAARRRGPPGAGLTVPPALLRANSDTSMALPDWMVFSAPGASSSGTPGPTSGPQGQSQPSAPSTKLSSGTLRSASSPRGARARSPSRGRHPEDAKRQPRGRPSSSGTPRDGPAGGTGGSGGPGGSLGSRGRRRKLYSAVPGRSFMAVKSYQAQGEGEISLSKGEKIKVLSIGEGGFWEGQVKGRVGWFPSDCLEEVANRSQEGRQESRSDKAKRLFRHYTVGSYDSFDAPSLIDGIDSGSDYIIKEKTVLLQKKDSEGFGFVLRGAKAQTPIEEFTPTPAFPALQYLESVDEGGVAWRAGLRMGDFLIEVNGQNVVKVGHRQVVNMIRQGGNTLMVKVVMVTRHPDMDEAVHKKASQQAKRLPPPAISLRSKSMTSELEEMEYEQQPAAVPSMEKKRTVYQMALNKLDEILAAAQQTISASESPGPGGLASLGKHRPKGFFATESSFDPHHRSQPSYDRPSFLPPGPGLMLRQKSIGAAEDDRPYLAPPAMKFSRSLSVPGSEDIPPPPTTSPPEPPYSTPPAPSSSGRLTPSPRGGPFNPSSGGPLPASSPSSFDGPSPPDTRGGGREKSLYHSAALPPAHHHPPHHHHHHAPPPQPHHHHAHPPHPPEMETGGSPDDPPPRLALGPQPSLRGWRGGGPSPTSGAPSPSHHSSSGGSSGPTQAPALRYFQLPPRAASAAMYVPARSGRGRKGPLVKQTKVEGEPQKGSIPSASSPTSPALPRSEPPPAGPSEKNSIPIPTIIIKAPSTSNSGRSSQGSSTEAEPPTQPDGAGGGGSSPSPAPATSPVPPSPSPVPTPASPSGPATLDFTSQFGAALVGAARREGGWQNEARRRSTLFLSTDAGDEDGGDSGLGPGGPPGPRLRHSKSIDEGMFSAEPYLRLESGGSSGGYGAYAAGSRAYGGSGSSSAFTSFLPPRPLVHPLTGKALDPASPLGLALAARERALKESSEGGGTPQPPPRPPSPRYDAPPPTLHHHSPHSPHSPHARHEPVLRLWGDPARRELGYRAGLGSQEKALTASPPAARRSLLHRLPPTAPGVGPLLLQLGPEPPTPHPGVSKAWRTAAPEEPERLPLHVRFLENCQARPPPAGTRGSSTEDGPGVPPPSPRRVLPTSPTSPRGNEENGLPLLVLPPPAPSVDVDDGEFLFAEPLPPPLEFSNSFEKPESPLTPGPPHPLPDPPSPATPLPAAPPPAVAAAPPTLDSTASSLTSYDSEVATLTQGAPAAPGDPPAPGPPAPAAPAPPAPQPGPDPPPGTDSGIEEVDSRSSSDHPLETISSASTLSSLSAEGGGNTGGVAGGGAGVANGTELLDTYVAYLDGQAFGGSGTPGPPYPPQLMTPSKLRGRALGTSGNLRPGPSGGLRDPVTPTSPTVSVTGAGTDGLLALSACPGPSTAGVAGGPVAVEPEVPPVPLPAASSLPRKLLPWEEGPGPPPPPLPGPLSQPQASALATVKASIISELSSKLQQFGGSSTAGGALPWARGGSGGSTDSHHGGASYIPERTSSLQRQRLSEDSQTSLLSKPSSSIFQNWPKPPLPPLPTGSGVSSSTAAAPGATSPSASSASASTRHLQGVEFEMRPPLLRRAPSPSLLPASDHKVSPAPRPSSLPILPSGPIYPGLFDIRSSPTGGAGGSTDPFAPVFVPPHPGISGGLGGALSGASRSLSPTRLLSLPPDKPFGAKPLGFWTKFDVADWLEWLGLSEHRAQFLDHEIDGSHLPALTKEDYVDLGVTRVGHRMNIDRALKFFLER

SEQ ID NO: 2444 - DNA, 3770 bp, Homo sapiens
  misc_feature (1)..(3770): n=a, c, g or t
  ref <308>: DATABASE ACCESSION NUMBER: Refseq / NM_022143
  ref <309>: DATABASE ENTRY DATE: 2002-04-18
cggggacaccacgccagtgctttcctgccttccttccgagatggaaagaggagctcctagctcacttaagccggggtagggctggttctcctttccgagccaaaatcccaggcgatggtgaattatgaacgtgccacaccatgaagctcttgtggcaggtaactgtgcaccaccacacctggaatgccatcctgctcccgttcgtctacctcacggcgcaagtgtggattctgtgtgcagccatcgctgctgccgcctcagccgggccccagaactgcccctccgtctgctcgtgcagtaaccagttcagcaaggtggtgtgcacgcgccggggcctctccgaggtcccgcagggtattccctcgaacacccggtacctcaacctcatggagaacaacatccagatgatccaggccgacaccttccgccacctccaccacctggaggtcctgcagttgggcaggaactccatccggcagattgaggtgggggccttcaacggcctggccagcctcaacaccctggagctgttcgacaactggctgacagtcatccctagcggggcctttgaatacctgtccaagctgcgggagctctggcttcgcaacaaccccatcgaaagcatcccctcttacgccttcaaccgggtgccctccctcatgcgcctggacttgggggagctcaagaagctggagtatatctctgagggagcttttgaggggctgttcaacctcaagtatctgaacttgggcatgtgcaacattaaagacatgcccaatctcacccccctggtggggctggaggagctggagatgtcagggaaccacttccctgagatcaggcctggctccttccatggcctgagctccctcaagaagctctgggtcatgaactcacaggtcagcctgattgagcggaatgcttttgacgggctggcttcacttgtggaactcaacttggcccacaataacctctcttctttgccccatgacctctttaccccgctgaggtacctggtggagttgcatctacaccacaacccttggaactgtgattgtgacattctgtggctagcctggtggcttcgagagtatatacccaccaattccacctgctgtggccgctgtcatgctcccatgcacatgcgaggccgctacctcgtggaggtggaccaggcctccttccagtgctctgcccccttcatcatggacgcacctcgagacctcaacatttctgagggtcggatggcagaacttaagtgtcggactccccctatgtcctccgtgaagtggttgctgcccaatgggacagtgctcagccacgcctcccgccacccaaggatctctgtcctcaacgacggcaccttgaacttttcccacgtgctgctttcagacactggggtgtacacatgcatggtgaccaatgttgcaggcaactccaacgcctcggcctacctcaatgtgagcacggctgagcttaacacctccaactacagcttcttcaccacagtaacagtggagaccacggagatctcgcctgaggacacaacgcgaaagtacaagcctgttcctaccacgtccactggttaccagccggcatataccacctctaccacggtgctcattcagactacccgtgtgcccaagcaggtggcagtacccgcgacagacaccactgacaagatgcagaccagcctggatgaagtcatgaagaccaccaagatcatcattggctgctttgtggcagtgactctgctagctgccgccatgttgattgtcttctataaacttcgtaagcggcaccagcagcggagtacagtcacagccgcccggactgttgagataatccaggtggacgaagacatcccagcagcaacatccgcagcagcaacagcagctccgtccggtgtatcaggtgagggggcagtagtgctgcccacaattcatgaccatattaactacaacacctacaaaccagcacatggggcccactggacagaaaacagcctggggaactctctgcaccccacagtcaccactatctctgaaccttatataattcagacccataccaaggacaaggtacaggaaactcaaatatgactcccctcccccaaaaaacttataaaatgcaatagaatgcacacaaagacagcaacttttgtacagagtggggagagactttttcttgtatatgcttatatattaagtctatgggctggttaaaaaaaacagattatattaaaatttaaagacaaaaagtcaaaacaaaaatattttctaacttgtaagttctatttaaagggggtgggggggaatcttgggaacgttgtggggtccaagccacaagttaacttgctatgctgccagaagggatttctggtataaggttgaaattgctgagataaaataaactaaaacaacaaacatccttaaagaggtagggtgtgggctgctgagggggcaagagggatagactgaatctgtcattttttagaagatgcttcataggacacaggactatccatttctacagacatctttcttaagccgagagctgtctttgcagaattatcttattaaaaaaaaatacaaaaaaaaagcaccatgaatttgtactgtgccaaaatgatagtggcaataatatttttcttcagaggctaaggggaagatagacctgtacatgtattttaagcaggaaaaccaccaaaattcaaacgaacccttaaaggggctgagtctttgtccatgtgcacaagtcttgggggtctgtgcactggacacacatgtgccttgcctgacagaattgcttagaaaggagcagagaaggacgggagctggcgtagctctcagtctaatgctttcacattgcaccagattcctgcagttgggcttaacccactctgcaaggcatgtgtctattcagggtttcccaggaggaggaggcccctgaaggggtgcggcagcaggggggtggtaagggagggtaaagcagagagaatgtattcacaggaggccataaattagcattgtgccatgtccacctgttgttcctggactctgacacatgattgtagacaatgatggcattttatgatttttaaaaaagattttgtttgttttaaggtggagagggaggagaagcctgaattggggagcttgggagtggaagcttttctcatgcttgtgatttggtgactcttctaaatgctgattcattagggattattacagcggatgtcaactggttgtggtgatggggtgggggcagaacatgaatagcaaagaaaagggagagacgaaaagggtacaggctcatgtaaagtaatgaagcctttcccaaccaggatggttcacaaaaaagctgtgagatccacagttacaagtgacacgcatgcacacatggagttccacatggggtactgttgaatggagcacactgatgggaagcttccctctcccaggccccctcaggagaaggtggaagagaaagggtgggcgtgggtggggaaggcagagatctctgttattctggtccatctaatgatgtaacttctttcagttattattttagctttaaaaggaaataaggggttcagatttgaaagggggtggtatgggtgggggaggggaattgccaacaaaanaacnctgattgtaatgtganaaaagngtatttttgtattttaataaanattgttgaatttttaaaaaaaaaaaaaaaaaaaaaaaaaaaaaaaaaaaagaaaaaaaaaaaaactctccagcgct

SEQ ID NO: 2445 - protein, 653 aa, Homo sapiens
  ref <308>: DATABASE ACCESSION NUMBER: Refseq / NP_071426
  ref <309>: DATABASE ENTRY DATE: 2002-04-18
MKLLWQVTVHHHTWNAILLPFVYLTAQVWILCAAIAAAASAGPQNCPSVCSCSNQFSKVVCTRRGLSEVPQGIPSNTRYLNLMENNIQMIQADTFRHLHHLEVLQLGRNSIRQIEVGAFNGLASLNTLELFDNWLTVIPSGAFEYLSKLRELWLRNNPIESIPSYAFNRVPSLMRLDLGELKKLEYISEGAFEGLFNLKYLNLGMCNIKDMPNLTPLVGLEELEMSGNHFPEIRPGSFHGLSSLKKLWVMNSQVSLIERNAFDGLASLVELNLAHNNLSSLPHDLFTPLRYLVELHLHHNPWNCDCDILWLAWWLREYIPTNSTCCGRCHAPMHMRGRYLVEVDQASFQCSAPFIMDAPRDLNISEGRMAELKCRTPPMSSVKWLLPNGTVLSHASRHPRISVLNDGTLNFSHVLLSDTGVYTCMVTNVAGNSNASAYLNVSTAELNTSNYSFFTTVTVETTEISPEDTTRKYKPVPTTSTGYQPAYTTSTTVLIQTTRVPKQVAVPATDTTDKMQTSLDEVMKTTKIIIGCFVAVTLLAAAMLIVFYKLRKRHQQRSTVTAARTVEIIQVDEDIPAATSAAATAAPSGVSGEGAVVLPTIHDHINYNTYKPAHGAHWTENSLGNSLHPTVTTISEPYIIQTHTKDKVQETQI

SEQ ID NO: 2446 - DNA, 3169 bp, Rattus norvegicus
  ref <308>: DATABASE ACCESSION NUMBER: Refseq / NM_057125
  ref <309>: DATABASE ENTRY DATE: 2003-01-13
cggctccagtctccctcgccatggcgcttgctgtattgcatgtcctagaacccttcccgactgagacaccaccgttggcggtgctgttgccgcccgggggcccgtggccagtgaccggggtaggcctggtgctggcgctacggccggcgagcgaaagtcctgcgggacccgcgctgctcgtggcggccgtggaagggtccggcgcccaatgcgagcagcgagggcccgggcctccgccgctgctggtgagccgcacgctgctgcgggtcctagcgctgagccccggagcgagagtgcgagcgcggcctgtgcggcggcctccagccttgggctgggcgctgcttggcacgtctccgggtcctgggcttgggcctcgagtcgggccgctgctggtgcgtcgcggggagacactaccggtgcccggttctcgagtgttggagacgcgaccggccttgcaagggttgctgggcccggggacacggctagctgtaactgagctccaggggcggaccaaactggacccggagagtagggaccacaaccatcccccacccccgcccgtagtttcctcctttgcagtttcccactcaatccggcagctccgaggagttctgggagggactggagatgcactaggtgtgagccggagctgtctccggagtctcgggctcttccagggcgaatgggtatgggtggcccgagtcggagagttaccaaacacctcccagccgcacttggctcaagtacaggttctagagcctcgctgggacctgtccgcgagactgggacccaactctgggcagccgggagagccactcgcggacggactggtgtttgtgcctgccactctagcttttaatctcggctgtgaccccctggaagtgggagagctcagaattcagaggtatctggaagactctactgctgctgaggacaaaggaagctgctcactactgcctgggcctccgtttgctcgagagttacacatcgaagttctgccctcgcctcactgtggtgtcaatgggaaatatgaccatgttctctaccagcacttccacacgcccagggtggtccaggaaggggatgttctgtgtgtgtcaacggctgggcaagttgagatcctggaaggaagcctggagagactgcccaggtggcgggaggtgtttttcaaagtgaagaaaacggttggagaagccccagatgggccagccagtgccttcctggccgataccacacacacctctttatacctggctggtaccaccctgagtcgtgtccccccgctgccttcaggaaggtccccaccctgggacagcttgtctcctccaggcctggaggccttggtaaatgagctgtgtgctgtcctgaagcctcatctgcagcccggaggaacactgctcacaggaaccagctgtgtgctcctgcagggtcccccaggcagcgggaagaccaccgcggtcacagctgcatgcagtcgcctcgggctccatctgctgaaggtgccttgctccagcctctgtgcagatagcagtaggactgtggagacaaagctgcagaccaccttctcccgggcccgccgctgcaggcctgtggtcctcctgctgacagccctggaccttctgggccgggaccgagatgggctgggtgaggatgcccgcgttgtggccacactgcgtcacctcctcctcgatgaggaccctctgagcaggtgccctcctctcatggtggtggccactacaagccgtgtccaggacctgcccaccgatgtgcggacggcatttcctcatgagctggaggtgccagtgttgtctgagagtcagcggctcagtgtcctgcaggccctcactgcccatcttcccttgggccaggaggttaacctgtcacagctggcacggcgctgtgcgggctttgtggtaggggacctctatgcccttctgacccatgccagccgggcagcctgcaccaggatcaaagctgcaggcttggcgatgagtgaggaggatgagggggagctgtgtgccgctggctttcccctgttggccgaggacttcgggcaggcgttagatcaactacaaacggctcactcccaagcagtaggagcgcccaagatcccttcagtgtcctggcacgatgtgggtgggctgcaggatgtgaagaaggagatcctggagaccatccaactgcctctggaacaccctgagctgctaagcctgggcctaagacgatcaggccttctgctccatgggcccccaggcactggcaagaccctgctggccaaggcggtagccactgagtgcagcctcacctttctcagtgtaaaggggccagaactcatcaacatgtatgtgggccaaagtgaggagaatgttcgggaagtgtttgccagggccagggctgctgccccgtgcatcatcttctttgatgaactggactccttagctccgagccgtggacggagtggagactctggaggtgtgatggacagagttgtgtctcagctcttagctgagctggacgggcttcacagcactcaggatgtgtttgtgatcggagccaccaacagaccagacctcctggatcctgcccttctgcggcctggcagatttgacaagctggtgtttgtaggagcaagtgaggaccgggcctcccagctgcgcgttctgagcgccatcacacgaaagttcaagctggaggcctctgtgagcctgatgaatgtgctggattgctgcccgcctcagctgaccggcgcagacctctattctctctgctctgacgccatgatgaccgccctcaaacgcagggtccgagacctagaggaagggctggagcctcggagctcagcactgttgctcaccatggaggacctgttgcaggccgcagcccggctgcagccctcagtcagcgagcaggagctgctgcgatacaagcgtatccaacgcaagtttgctgcctgctaggagcttcctgccgcctgcaaaagcccacctggctggaggtagctgccacctgccacctgaaggctgcctccctccaggagataccctgagatccctagtgggaggcccttgtgcccaggagaagaggcagggctggcagcttgggggcgtggcagcctggaatgggcattgaggccccagttctcagacagaaaataaagtctatactgccc

SEQ ID NO: 2447 - protein, 978 aa, Rattus norvegicus
  ref <308>: DATABASE ACCESSION NUMBER: Refseq / NP_476466
  ref <309>: DATABASE ENTRY DATE: 2003-01-13
MALAVLHVLEPFPTETPPLAVLLPPGGPWPVTGVGLVLALRPASESPAGPALLVAAVEGSGAQCEQRGPGPPPLLVSRTLLRVLALSPGARVRARPVRRPPALGWALLGTSPGPGLGPRVGPLLVRRGETLPVPGSRVLETRPALQGLLGPGTRLAVTELQGRTKLDPESRDHNHPPPPPVVSSFAVSHSIRQLRGVLGGTGDALGVSRSCLRSLGLFQGEWVWVARVGELPNTSQPHLAQVQVLEPRWDLSARLGPNSGQPGEPLADGLVFVPATLAFNLGCDPLEVGELRIQRYLEDSTAAEDKGSCSLLPGPPFARELHIEVLPSPHCGVNGKYDHVLYQHFHTPRVVQEGDVLCVSTAGQVEILEGSLERLPRWREVFFKVKKTVGEAPDGPASAFLADTTHTSLYLAGTTLSRVPPLPSGRSPPWDSLSPPGLEALVNELCAVLKPHLQPGGTLLTGTSCVLLQGPPGSGKTTAVTAACSRLGLHLLKVPCSSLCADSSRTVETKLQTTFSRARRCRPVVLLLTALDLLGRDRDGLGEDARVVATLRHLLLDEDPLSRCPPLMVVATTSRVQDLPTDVRTAFPHELEVPVLSESQRLSVLQALTAHLPLGQEVNLSQLARRCAGFVVGDLYALLTHASRAACTRIKAAGLAMSEEDEGELCAAGFPLLAEDFGQALDQLQTAHSQAVGAPKIPSVSWHDVGGLQDVKKEILETIQLPLEHPELLSLGLRRSGLLLHGPPGTGKTLLAKAVATECSLTFLSVKGPELINMYVGQSEENVREVFARARAAAPCIIFFDELDSLAPSRGRSGDSGGVMDRVVSQLLAELDGLHSTQDVFVIGATNRPDLLDPALLRPGRFDKLVFVGASEDRASQLRVLSAITRKFKLEASVSLMNVLDCCPPQLTGADLYSLCSDAMMTALKRRVRDLEEGLEPRSSALLLTMEDLLQAAARLQPSVSEQELLRYKRIQRKFAAC

SEQ ID NO: 2448 - DNA, 2627 bp, Rattus norvegicus
  ref <308>: DATABASE ACCESSION NUMBER: Refseq / NM_013033
  ref <309>: DATABASE ENTRY DATE: 2003-01-14
gcgttcctgccgcgcagcccctccgtcgcggttcccctccctcggggctgatcattaactcaaaagcagtataaggagtgagtggccccggtgagccggtgagccggagggactcgtcgccaccgccatggacagtagcaccttgagccccgctgttactgccaccgatgcacccatccagtcctatgagcgcattcgcaatgcggctgacatatcagtcatcgtcatctacttcgtggtggtgatggctgtcgggctgtgggccatgttttccactaatcgtgggactgttggaggcttcttcctggcaggccgaagtatggtgtggtggccgattggagcctctctctttgccagtaacatcggaagtggtcactttgtggggctggcgggcacaggagcagccgcaggcattgccatgggtggcttcgaatggaacgccttggtgttcgtggtcgtgctggggtggctttttgtccctatttacatcaaggctggggtggtgacgatgccggagtatctgcggaagcgatttggaggcaagcggatccagatctacctttccgttctgtccctgctcctctacatctttaccaagatctcagcagacatcttctctggggctatattcatcaatctggccttgggcctggatatatacctggccattttcatcctgctggccatcaccgccctttacaccatcacagggggactggcagcagtaatttacacagacaccttgcagactgcgatcatgctggtgggatcttttatcctgactgggtttgctttccgagaagtaggagggtatgaggccttcatggataagtacatgaaagctattccaactttggtttctgatggaaacataaccgtcaaagaagaatgttacacacccagggccgactcgttccacatattccgagaccccattacgggggacatgccatggcctgggctcatcttcggcctgtccatcctcgccctgtggtactggtgtacggatcaggtcattgtgcagcgatgcctctcggccaagaacatgtctcacgtgaaggctggctgtaccctgtgtggctatctgaagctactgcctatgttcctcatggtgatgcccggaatgatcagccggattctatacacagacaaaatcgcctgtgtcctcccctcagaatgtaagaaatactgcggcaccccagtgggctgtaccaacatcgcctacccaacactggtggtggaactcatgcctaacggacttcgaggcctgatgctgtccgtcatgatggcttccctcatgagctccttgacctccatcttcaacagcgccagtactctcttcaccatggacatctacaccaagatccggaagggtgcatcggagaaggagctcatgattgcaggaaggttgttcatcctcgtgctgattggcatcagcattgcctgggtgcccattgtgcagtctgcccaaagcgggcagctctttgactacatccagtccatcaccagttacctggggccacccattgcagccgtcttcctgctggctattttctgcaagagagtcaatgaaccgggagccttctggggactgattctcggcttcctgattggaatctcccgtatgatcactgagtttgcctacggaactggaagctgcatggagcccagcaactgccccaagatcatctgcggggtccactatctgtactttgccatcatcctcttcgctatcagcgtcgtcaccgtcttggtcatctccctcctcaccaagcccatcccagacgtacacctgtaccgtctgtgctggagtctacgtaacagcacagaagagcgcatcgacctggatgcaggagaggaggagcccgtcgaggaggaccctaaagataccattgaaatagatgcagaagccccccagaaggagaaggggtgcttcaggaaggcatatgacctgttctgtgggctggaccaggataaaggaccgaagatgactaaggaagaggaggaagctatgaagctgaagatgacggacacttccgagaagcccttgtggaggacagtggtgaacatcaacggcatcatcctcctggcagtggctgtcttctgccacgcctattttgcctgaaccccgccttctgggggtagacttggcgactctggagttgttatttcccactagaccccgccactctgtagtggtaaggggaaactggccagttgtaaattttactcattcggataaaagatgtataagtgtgattatagacttgcttgaggaaaatgattaccctgctgtgaatttatgcctgtgaaaccagtgtgccacactcatccatcacaccagagctttggagtgacgttgactcagatgtagaaaaagtcataccgagacacagaggccctgtgttgtctgtctcaggtacgtccagcgtgtaactattgtttataattcttaaatactattttttaaaattgtggtctggttcctgacatttttctacctgacccctcaccaattcctcctcctcctcctattttttttttctaaaagaaatctcccatcatcgcatccctttagagttttttggttttttgttttgttttgttttttgtttttgtttttaatt

SEQ ID NO: 2449 - protein, 665 aa, Rattus norvegicus
  ref <308>: DATABASE ACCESSION NUMBER: Refseq / NP_037165
  ref <309>: DATABASE ENTRY DATE: 2003-01-14
MDSSTLSPAVTATDAPIQSYERIRNAADISVIVIYFVVVMAVGLWAMFSTNRGTVGGFFLAGRSMVWWPIGASLFASNIGSGHFVGLAGTGAAAGIAMGGFEWNALVFVVVLGWLFVPIYIKAGVVTMPEYLRKRFGGKRIQIYLSVLSLLLYIFTKISADIFSGAIFINLALGLDIYLAIFILLAITALYTITGGLAAVIYTDTLQTAIMLVGSFILTGFAFREVGGYEAFMDKYMKAIPTLVSDGNITVKEECYTPRADSFHIFRDPITGDMPWPGLIFGLSILALWYWCTDQVIVQRCLSAKNMSHVKAGCTLCGYLKLLPMFLMVMPGMISRILYTDKIACVLPSECKKYCGTPVGCTNIAYPTLVVELMPNGLRGLMLSVMMASLMSSLTSIFNSASTLFTMDIYTKIRKGASEKELMIAGRLFILVLIGISIAWVPIVQSAQSGQLFDYIQSITSYLGPPIAAVFLLAIFCKRVNEPGAFWGLILGFLIGISRMITEFAYGTGSCMEPSNCPKIICGVHYLYFAIILFAISVVTVLVISLLTKPIPDVHLYRLCWSLRNSTEERIDLDAGEEEPVEEDPKDTIEIDAEAPQKEKGCFRKAYDLFCGLDQDKGPKMTKEEEEAMKLKMTDTSEKPLWRTVVNINGIILLAVAVFCHAYFA

SEQ ID NO: 2450 - DNA, 4388 bp, Rattus norvegicus
  ref <308>: DATABASE ACCESSION NUMBER: Refseq / NM_012575
  ref <309>: DATABASE ENTRY DATE: 2003-01-14
ggatttccccagacgctgcccccaacgtcttggttcccctcagctctgcgtgctccaaaagaagggtggtaggaaaaggccacgggagagcctgcgctccggtgccctgggccctggaagcaccggttggcagctgtggtctcttggggcttcaaccaggacccccgacggctgagaggagaagcccaagcctttggctgcggaaggctttttgtgcttggcctaggaagaacgggcaggaacaaaggcacgataaggacagcttaccattcgaatagcagggggaggttctctcttctctgtcctctggctgtgtggtctctggcccttcccttcttctgtttgtccatctacctctctctatgcctgctctggtttctctgcaggaccctccagtggacatgggtggggccctagggcccgccctgctgctcacttcactccttggtgcttgggcaaggctgggcgcagggcagggagaacaggccgtgactgtggcggtggtgtttggcagctctgggccactgcagacccaggcccggactcgtcttacctcccagaacttcctggacctgcctctggagatccagccactcaccgtaggggtcaacaataccaatcccagcagcatcctcacccaaatctgcgggcttctgggtgccgcccgtgtccacggcatcgtctttgaggacaacgtggacaccgaggccgtggcccagctactggacttcgtctcctcccagacccacgtgcccatcctcagcatcagcggaggctctgctgtggtcctcacccccaaggagccaggctccgccttcctacagctgggcgtgtccctggagcagcagctgcaggtgctgttcaaggtgctggaggaatacgactggagcgcgttcgcggtcatcaccagcctgcatccgggccacgcgctcttcctcgaaggcgtgcgcgccgtcgcggacgccagctacctgagctggcggctgctggacgtgctcacgctggagctaggtccgggtgggccgcgagcgcgcactcagcgcctgctacgccaggtcgacgcgccggtgctggtggcttactgctcccgtgaagaggccgaggtgctcttcgctgaggctgcacaggctggcctggtgggacccgggcacgtgtggttggtacctaacctggcgctgggaagcaccgacgcaccccctgcagctttcccggtgggcctcatcagtgtggtcaccgagagttggcgccttagtctacgccagaaggttcgcgacggagtggccattctggccctcggtgcccacagctaccgacgccagtacggtaccctgccagccccggctggggactgccgaagccacccgggacccgtcagccctgctagggaggccttctacaggcatctgctgaatgtcacctgggagggccgagacttctctttcagccctggtgggtacctggttcggcccaccatggttgtgatcgccctcaaccggcaccgcctctgggagatggtgggacggtgggaccatggagtcctgtacatgaagtatccagtatggcctcgctacagcacttctctgcagcctgtggtggacagccggcacctgacagtggccacactggaagaaaggccctttgtcattgtggagagccctgaccctggcacaggtggctgtgttcccaacaccgtgccctgccgcagacagagcaaccacaccttcagcagcggggatctaaccccctacaccaagctctgttgtaagggcttctgcatcgacatcctcaaaaagctggccaaggtggtcaagttctcctacgacttgtacctggtgaccaacggcaaacacggcaagagggttcgtggtgtgtggaacggcatgatcggggaggtatactacaagcgggcagacatggccatcggctccctcaccatcaatgaggagcgctctgagattatagatttctctgtgccttttgtggagaccggcatcagtgttatggtatcaaggagcaacggcaccgtctccccctcagcttttctggaaccctacagccctgccgtgtgggtgatgatgttcgtgatgtgtctcacggtggttgccatcactgtcttcatgttcgagtacttcagccctgtcagctacaaccagaacctcaccaagggcaagaaacctggtggaccatctttcaccattggcaagtccgtgtggttgctgtgggcactggtcttcaacaactctgttcccatcgagaacccccggggtaccaccagcaagatcatggtcctggtgtgggccttcttcgctgtcatcttcctcgctagctatacggccaatctggcggccttcatgatccaggagcaatacatcgacactgtgtcgggccttagtgacaagaagtttcagcggcctcaagaccaatacccacccttccgttttggcacggtacctaacggcagcacagagaggaacatccgtagcaactaccgtgacatgcacacccacatggtcaagttcaaccagcgctcggtggaggacgctctcacaagcctgaagatggggaagctggacgccttcatctatgatgctgctgtgctcaactacatggcgggcaaggacgaaggctgcaagctggtcaccattgggtctggcaaagtctttgccaccactggctatggcattgccatgcagaaagactcccactggaagcgggccatagacctggcactcctgcaacttctgggggatggagagacgcagaagctggagacagtgtggctctcagggatctgccagaacgagaagaatgaggtgatgagcagcaagctggacattgacaacatggcgggggtcttctacatgctgttggtggccatgggactggcccttctggtctttgcctgggagcacctggtctactggaaacttcgacactcggtgcccaactcatcccagctggacttcctgctggctttcagcaggggcatctacagctgcttcaacggggtacagagccttccgagtcccgcacggccgcccagcccggatctcaccgcagactcagcccaggccaatgtgctgaagatgctgcaggcggcccgagacatggtgaacaccgcggacgtgagcagctctttggaccgcgccactcgcaccatcgagaactggggcaacaaccgccgcgtgcctgctcccaccgcctctggcccgcggtcctccaccccgggtcctccgggacaaccgagccccagcggctgggggcctcctggtgggggccgcaccccgctagcgcgcagggccccgcagcctccggctcgccccgcgacgtgcgggccacctttgcccgatgtgtcccgaccatcctgcaggcacgcttcggacgcgcggtggccggtgcgagttgggcatcagggaccgcacgtctcggcttccgagcggcgcgcgctcccggagcgctctctgttgcccgcgcactgccactacagttccttccctcgagcggagagatccgggcgcccctacctcccgttattcccggagcccccggagcccgacgacctgcctctgctcgggccggaacagctggctcggcgggaagcaatgctgcgcgcggcctgggcccggggcccgcgccctcgccacgcttccttgcccagctcggtggcagaagctttcactcgatccaaccctctgcctgccaggtgtaccggtcacgcctgtgcctgcccgtgcccccaaagccggccatcctgcaggcacttggctcaggcacagtcgctgaggctgccgtcctacccggaggcctgtgtggagggcgtaccagcaggggtggccacctggcagcccagacagcacgtctgcctgcacgcccatacccgcctgccgttctgttggggaactgtctgccgtcaccctccaccctgtaccagccacagcccctggctcattggaacctgggagcctccagcacacagagtcaggaccctggggctaggcacaggctacagggacagtggggtgctggaagaggtcagcagggaagcctgtgggacacaaggttttccaaggtcctgcacctggaggcgggtctccagcctggaatcagaagtgtgaggttactggcagctttggttcctgctggactggcttctgtggccggccttggccaggtttgggggacaggccagcttgggctcctctggcttctattttgaaatcctggccatgggaccccagtgaaaaggatatcttccaggcccagcttttgaccttagtgtgggctgggatcttgttcatcacatgacctcttgcggtggtcacagggagtaaaaatgtgtccctgtcctgttgtcagctagttcctagttgtggttgctgtggccttgg

SEQ ID NO: 2451 - protein, 1250 aa, Rattus norvegicus
  ref <308>: DATABASE ACCESSION NUMBER: Refseq / NP_036707
  ref <309>: DATABASE ENTRY DATE: 2003-01-14
MPALVSLQDPPVDMGGALGPALLLTSLLGAWARLGAGQGEQAVTVAVVFGSSGPLQTQARTRLTSQNFLDLPLEIQPLTVGVNNTNPSSILTQICGLLGAARVHGIVFEDNVDTEAVAQLLDFVSSQTHVPILSISGGSAVVLTPKEPGSAFLQLGVSLEQQLQVLFKVLEEYDWSAFAVITSLHPGHALFLEGVRAVADASYLSWRLLDVLTLELGPGGPRARTQRLLRQVDAPVLVAYCSREEAEVLFAEAAQAGLVGPGHVWLVPNLALGSTDAPPAAFPVGLISVVTESWRLSLRQKVRDGVAILALGAHSYRRQYGTLPAPAGDCRSHPGPVSPAREAFYRHLLNVTWEGRDFSFSPGGYLVRPTMVVIALNRHRLWEMVGRWDHGVLYMKYPVWPRYSTSLQPVVDSRHLTVATLEERPFVIVESPDPGTGGCVPNTVPCRRQSNHTFSSGDLTPYTKLCCKGFCIDILKKLAKVVKFSYDLYLVTNGKHGKRVRGVWNGMIGEVYYKRADMAIGSLTINEERSEIIDFSVPFVETGISVMVSRSNGTVSPSAFLEPYSPAVWVMMFVMCLTVVAITVFMFEYFSPVSYNQNLTKGKKPGGPSFTIGKSVWLLWALVFNNSVPIENPRGTTSKIMVLVWAFFAVIFLASYTANLAAFMIQEQYIDTVSGLSDKKFQRPQDQYPPFRFGTVPNGSTERNIRSNYRDMHTHMVKFNQRSVEDALTSLKMGKLDAFIYDAAVLNYMAGKDEGCKLVTIGSGKVFATTGYGIAMQKDSHWKRAIDLALLQLLGDGETQKLETVWLSGICQNEKNEVMSSKLDIDNMAGVFYMLLVAMGLALLVFAWEHLVYWKLRHSVPNSSQLDFLLAFSRGIYSCFNGVQSLPSPARPPSPDLTADSAQANVLKMLQAARDMVNTADVSSSLDRATRTIENWGNNRRVPAPTASGPRSSTPGPPGQPSPSGWGPPGGGRTPLARRAPQPPARPATCGPPLPDVSRPSCRHASDARWPVRVGHQGPHVSASERRALPERSLLPAHCHYSSFPRAERSGRPYLPLFPEPPEPDDLPLLGPEQLARREAMLRAAWARGPRPRHASLPSSVAEAFTRSNPLPARCTGHACACPCPQSRPSCRHLAQAQSLRLPSYPEACVEGVPAGVATWQPRQHVCLHAHTRLPFCWGTVCRHPPPCTSHSPWLIGTWEPPAHRVRTLGLGTGYRDSGVLEEVSREACGTQGFPRSCTWRRVSSLESEV

SEQ ID NO: 2452 - DNA, 4339 bp, Homo sapiens
  ref <308>: DATABASE ACCESSION NUMBER: Refseq / NM_000835
  ref <309>: DATABASE ENTRY DATE: 2003-01-17
cccttaataagatttgccacgtacactcgagccatcgcgagtgtccttgagccgcgggtgacggtggctctcgctgctcgcgccccctcctcccgcggggggagcctgatgccacgttccctatgaattatttatcgccggcctaaaaataccccgaacttcacagcccgagtgaccctccggtggacatgggtggggccctggggccggccctgttgctcacctcgctcttcggtgcctgggcagggctgggtccggggcagggcgagcagggcatgacggtggccgtggtgtttagcagctcagggccgccccaggcccagttccgtgcccgcctcaccccccagagcttcctggacctacccctggagatccagccgctcacagttggggtcaacaccaccaaccccagcagcctcctcacccagatctgcggcctcctgggtgctgcccacgtccacggcattgtctttgaggacaacgtggacaccgaggcggtggcccagatccttgacttcatctcctcccagacccatgtgcccatcctcagcatcagcggaggctctgctgtggtcctcacccccaaggagccgggctccgccttcctgcagctgggcgtgtccctggagcagcagctgcaggtgctgttcaaggtgctggaagagtacgactggagcgccttcgccgtcatcaccagcctgcacccgggccacgcgctcttcctggagggcgtgcgcgccgtcgccgacgccagccacgtgagttggcggctgctggacgtggtcacgctggagctgggcccgggagggccgcgcgcgcgcacgcagcgcctgctgcgccagctcgacgcgcccgtgtttgtggcctactgctcgcgcgaggaggccgaggtgctcttcgccgaggcggcgcaggccggtctggtggggcccggccacgtgtggctggtgcccaacctggcgctgggcagcaccgatgcgccccccgccaccttccccgtgggcctcatcagcgtcgtcaccgagagctggcgcctcagcctgcgccagaaggtgcgcgacggcgtggccattctggccctgggcgcccacagctactggcgccagcatggaaccctgccagccccggccggggactgccgtgttcaccctgggcccgtcagccctgcccgggaggccttctacaggcacctactgaatgtcacctgggagggccgagacttctccttcagccctggtgggtacctggtccagcccaccatggtggtgatcgccctcaaccggcaccgcctctgggagatggtggggcgctgggagcatggcgtcctatacatgaagtaccccgtgtggcctcgctacagtgcctctctgcagcctgtggtggacagtcggcacctgacggtggccacgctggaagagcggccctttgtcatcgtggagagccctgaccctggcacaggaggctgtgtccccaacaccgtgccctgccgcaggcagagcaaccacaccttcagcagcggggacgtggccccctacaccaagctctgctgtaagggattctgcatcgacatcctcaagaagctggccagagtggtcaaattctcctacgacctgtacctggtgaccaacggcaagcatggcaagcgggtgcgcggcgtatggaacggcatgattggggaggtgtactacaagcgggcagacatggccatcggctccctcaccatcaatgaggaacgctccgagatcgtagacttctctgtaccctttgtggagacgggcatcagtgtgatggtggctcgcagcaatggcaccgtctccccctcggccttcttggagccatatagccctgcagtgtgggtgatgatgtttgtcatgtgcctcactgtggtggccatcaccgtcttcatgttcgagtacttcagccctgtcagctacaaccagaacctcaccagaggcaagaagtccgggggcccagctttcactatcggcaagtccgtgtggctgctgtgggcgctggtcttcaacaactcagtgcccatcgagaacccgcggggcaccaccagcaagatcatggttctggtctgggccttctttgctgtcatcttcctcgccagctacacggccaacctggccgccttcatgatccaagagcaatacatcgacactgtgtcgggcctcagtgacaagaagtttcagcggcctcaagatcagtacccacctttccgcttcggcacggtgcccaacggcagcacggagcggaacatccgcagtaactaccgtgacatgcacacccacatggtcaagttcaaccagcgctcggtggaggacgcgctcaccagcctcaagatggggaagctggatgccttcatctatgatgctgctgtcctcaactacatggcaggcaaggacgagggctgcaagctggtcaccattgggtctggcaaggtctttgctaccactggctacggcatcgccatgcagaaggactcccactggaagcgggccatagacctggcgctcttgcagttcctgggggacggagagacacagaaactggagacagtgtggctctcagggatctgccagaatgagaagaacgaggtgatgagcagcaagctggacatcgacaacatggcaggcgtcttctacatgctgctggtggccatggggctggccctgctggtcttcgcctgggagcacctggtctactggaagctgcgccactcggtgcccaactcatcccagctggacttcctgctggctttcagcaggggcatctacagctgcttcagcggggtgcagagcctcgccagcccaccgcggcaggccagcccggacctcacggccagctcggcccaggccagcgtgctcaagatgctgcaggcagcccgcgacatggtgaccacggcgggcgtaagcagctccctggaccgcgccactcgcaccatcgagaattggggtggcggccgccgtgcgcccccaccgtccccctgcccgaccccgcggtctggccccagcccatgcctgcccacccccgacccgcccccagagccgagccccacgggctggggaccgccagacgggggtcgcgcggcgcttgtgcgcagggctccgcagcccccgggccgccccccgacgccggggccgcccctgtccgacgtctcccgagtgtcgcgccgcccagcctgggaggcgcggtggccggtgcggaccgggcactgcgggaggcacctctcggcctccgagcggcccctgtcgcccgcgcgctgtcactacagctcctttcctcgagccgaccgatccggccgccccttcctcccgctcttcccggagcccccggagctggaggacctgccgctgctcggtccggagcagctggcccggcgggaggccctgctgcacgcggcctgggcccggggctcgcgcccgcgtcacgcttccctgcccagctccgtggccgaggccttcgctcggcccagctcgctgcccgctgggtgcaccggccccgcctgcgcccgccccgacggccactcggcctgcaggcgcttggcgcaggcgcagtcgatgtgcttgccgatctaccgggaggcctgccaggagggcgagcaggcaggggcccccgcctggcagcacagacagcacgtctgcctgcacgcccacgcccacctgccattttgctggggggctgtctgtcctcaccttccaccctgtgccagccacggctcctggctctccggggcctgggggcctctggggcacaggggcaggactctggggctgggcacaggctacagagacagtgggggactggacgagatcagcagtgtagcccgtgggacgcaaggcttcccgggaccctgcacctggagacggatctccagtctggagtcagaagtgtgagttatcagccactcaggctccgagccagctggattctctgcctgccactgtcagggttaagcggcaggcaggattgggcttttctggcttctaccatgaaatcctggccatgggaccccagtgacagatgatgtcttccatggtcatcagtgacctcagtagcctcaaatcatggtgagggctgggcttttgctgtcctcttctcacgcagagttctgccaggagggtgtgctgtgggggtcagactcctgaggctctcccttccctggggctagccagttactggtcatgcctgctgtgggcatggaggctggaacttgtggttgaggcagggccatcccgatccttgctctacctggctagagtttcttctcatcagagcactgggacattaaacccaccttttcccagaaaaaaaaaaaaaaaaaaaaaaaaaaaaa

SEQ ID NO: 2453 - protein, 1236 aa, Homo sapiens
  ref <308>: DATABASE ACCESSION NUMBER: Refseq / NP_000826
  ref <309>: DATABASE ENTRY DATE: 2003-01-17
MGGALGPALLLTSLFGAWAGLGPGQGEQGMTVAVVFSSSGPPQAQFRARLTPQSFLDLPLEIQPLTVGVNTTNPSSLLTQICGLLGAAHVHGIVFEDNVDTEAVAQILDFISSQTHVPILSISGGSAVVLTPKEPGSAFLQLGVSLEQQLQVLFKVLEEYDWSAFAVITSLHPGHALFLEGVRAVADASHVSWRLLDVVTLELGPGGPRARTQRLLRQLDAPVFVAYCSREEAEVLFAEAAQAGLVGPGHVWLVPNLALGSTDAPPATFPVGLISVVTESWRLSLRQKVRDGVAILALGAHSYWRQHGTLPAPAGDCRVHPGPVSPAREAFYRHLLNVTWEGRDFSFSPGGYLVQPTMVVIALNRHRLWEMVGRWEHGVLYMKYPVWPRYSASLQPVVDSRHLTVATLEERPFVIVESPDPGTGGCVPNTVPCRRQSNHTFSSGDVAPYTKLCCKGFCIDILKKLARVVKFSYDLYLVTNGKHGKRVRGVWNGMIGEVYYKRADMAIGSLTINEERSEIVDFSVPFVETGISVMVARSNGTVSPSAFLEPYSPAVWVMMFVMCLTVVAITVFMFEYFSPVSYNQNLTRGKKSGGPAFTIGKSVWLLWALVFNNSVPIENPRGTTSKIMVLVWAFFAVIFLASYTANLAAFMIQEQYIDTVSGLSDKKFQRPQDQYPPFRFGTVPNGSTERNIRSNYRDMHTHMVKFNQRSVEDALTSLKMGKLDAFIYDAAVLNYMAGKDEGCKLVTIGSGKVFATTGYGIAMQKDSHWKRAIDLALLQFLGDGETQKLETVWLSGICQNEKNEVMSSKLDIDNMAGVFYMLLVAMGLALLVFAWEHLVYWKLRHSVPNSSQLDFLLAFSRGIYSCFSGVQSLASPPRQASPDLTASSAQASVLKMLQAARDMVTTAGVSSSLDRATRTIENWGGGRRAPPPSPCPTPRSGPSPCLPTPDPPPEPSPTGWGPPDGGRAALVRRAPQPPGRPPTPGPPLSDVSRVSRRPAWEARWPVRTGHCGRHLSASERPLSPARCHYSSFPRADRSGRPFLPLFPEPPELEDLPLLGPEQLARREALLHAAWARGSRPRHASLPSSVAEAFARPSSLPAGCTGPACARPDGHSACRRLAQAQSMCLPIYREACQEGEQAGAPAWQHRQHVCLHAHAHLPFCWGAVCPHLPPCASHGSWLSGAWGPLGHRGRTLGLGTGYRDSGGLDEISSVARGTQGFPGPCTWRRISSLESEV

SEQ ID NO: 2454 - DNA, 2101 bp, Rattus norvegicus
  ref <308>: DATABASE ACCESSION NUMBER: Refseq / NM_147206
  ref <309>: DATABASE ENTRY DATE: 2003-01-14
agcagccttatatgtatcaagatgcattttattaagtcttcatgggtatctggggaagaataaattgtttgtttggcctgagcaccaattagtgtccacatctctgagaaagaacatggatctacaactatccgtgaaagcccaatgcatgggggcaacatcaattagtactcgtgccgaattcggcacgaggggagctcagcacgttcagccctgcaaagggcagtacacaaaattgagagtaaagctcgaagagagacttgtttaaagaaaacggcaatggatttgatcccaaacttttccatggaaacctggctgctcctggttatcagcctggtgctcctctacctatatggaactcattcacatggaatttttaaaaagttgggaattcctgggcccaaacctttgcctttcttggggacgattcttgcttacaggaagggcttctgggaatttgacaaatactgccataaaaaatatgggaaattatgggggttgtacgatggtcgacagcctgtgctagcgatcacggatccagacataatcaaaacagtgctggtgaaggaatgttactctaccttcacaaaccgacggaactttggtccagtgggtattttgaaaaaagccatctccatctctgaggatgaagaatggaagagaattcgagccctgctgtctccaaccttcaccagtgggaagctcaaggagatgttccccatcattaaccagtatacagatatgttggtgagaaacatgaggcagggatcggaggaaggcaagcccaccagcatgaaagacatctttggggcctacagcatggatgtgatcacagccacctcatttggagtgaatgttgattcccttaacaacccacaggacccttttgtggaaaaagtcaagaagctcttaaaatttgatatctttgatccattgttcctctcagtgacactttttccattccttaccccactatttgaagcactaaatgtctccatgtttccaagagatgtcattgacttttttaaaacttcagtagaacgaatgaaagagaatcgcatgaaagagaaagaaaagcaaagaatggactttcttcagctgatgataaactcccagaattccaaagtcaaagactctcataaagcattatccgatgtggagattgtggcccagtcagttatcttcatttttgccggctatgagaccactagcagtgctctttcctttgttttgtatttgctggccattcaccctgatatacagaagaaactgcaggatgaaattgatgcagctctccccaataaggcacatgccacctatgataccctgctacaaatggagtatctagatatggtggtgaatgaaaccctcagattatatccaattgctggaaggcttgagagggtctgtaagacagatgttgaaatcaatggggtgttcattcccaaagggactgtggtgatgataccaacctttgctcttcacaaagacccgcattactggccagagcctgaggaattccgccctgaaaggttcagcaagaagaatcaggataacatcaatccttatatgtacctgccctttgggaatggacccaggaactgtattggcatgaggtttgctctcatgaacatgaaagttgctcttgtcagagtcctgcagaacttctccttccaaccttgtaaggaaactcagatccctttaaaattgagcaaacaaggacttcttcaaccagaaaagccactgcttctaaaagttgtgtccagagatgagactgtgaatggagcttgatgtagaatggcctatagtggtgttgtatcacatggaccagaaaccagttcatattgtgaatgaatccagagatgaagattgcagtaattttgttcactcctgggggttttgggtgttctttgagctttctcagcctctgtgcaagttgttttctgtggaacataaggatctaatgacataaatccaagataaatatattcaactcgtggttcttgtgggatggcctatgttaccttcattgttaccaccaaatactctgatttctgatgagaaaataaataaacatcaattactagttctatcaccatta

SEQ ID NO: 2455 - protein, 503 aa, Rattus norvegicus
  ref <308>: DATABASE ACCESSION NUMBER: Refseq / NP_671739
  ref <309>: DATABASE ENTRY DATE: 2003-01-14
MDLIPNFSMETWLLLVISLVLLYLYGTHSHGIFKKLGIPGPKPLPFLGTILAYRKGFWEFDKYCHKKYGKLWGLYDGRQPVLAITDPDIIKTVLVKECYSTFTNRRNFGPVGILKKAISISEDEEWKRIRALLSPTFTSGKLKEMFPIINQYTDMLVRNMRQGSEEGKPTSMKDIFGAYSMDVITATSFGVNVDSLNNPQDPFVEKVKKLLKFDIFDPLFLSVTLFPFLTPLFEALNVSMFPRDVIDFFKTSVERMKENRMKEKEKQRMDFLQLMINSQNSKVKDSHKALSDVEIVAQSVIFIFAGYETTSSALSFVLYLLAIHPDIQKKLQDEIDAALPNKAHATYDTLLQMEYLDMVVNETLRLYPIAGRLERVCKTDVEINGVFIPKGTVVMIPTFALHKDPHYWPEPEEFRPERFSKKNQDNINPYMYLPFGNGPRNCIGMRFALMNMKVALVRVLQNFSFQPCKETQIPLKLSKQGLLQPEKPLLLKVVSRDETVNGA

SEQ ID NO: 2456 - DNA, 4472 bp, Rattus norvegicus
  ref <308>: DATABASE ACCESSION NUMBER: Refseq / NM_012914
  ref <309>: DATABASE ENTRY DATE: 2003-01-14
actgccgtcggggaaggtcccagcgcggtcatggcctcccagggcggccgccccgcctcaagttcgcagcattctgcacagtagcccggaggagaagcggcctggacgtcgcggccggccggggaagcagcatggaggaggcgcacctgctctcggctgccgacgtgctgcgtcgcttctcggtgacagccgagggcggcttgaccctggagcaggtgaccgacgcccgggagcgatacggccccaacgaactccctactgaggaagggaaatccctgtgggagctggtggtggagcagtttgaggacctcttggtgcgcatcctgctgctggcagccctggtttcctttgtcctggcctggtttgaggagggtgaggagaccacgacggccttcgtggagcccctcgtcatcatgttaatccttgtggccaatgcgatcgtgggagtgtggcaggaacgcaatgctgagagtgccattgaggccttgaaggagtatgagcctgagatgggtaaggtgatccgctctgaccgcaagggtgtgcagaggatccgagccagggacatcgtccctggggacattgtggaagtggcagtgggagacaaggtacctgctgacctccgcctcatcgagatcaagtccaccacacttcgagtggaccagtccatcctgacaggggaatccgtgtctgtgactaagcacacagatgccattccagacccccgagccgtgaaccaggacaagaagaacatgctgttttctggcaccaatattgcatcaggcaaagccctgggtgtggctgtggccacaggcttgcacacagagctgggcaagattcggagccagatggcggctgtggagcctgagcggacgccactgcagcgcaagctggatgaatttgggaggcagctgtcccatgccatctctgtgatctgtgtggctgtgtgggtcatcaacatcggacactttgctgacccggcccatggtggatcctggctccgtggggcagtctactacttcaagattgctgtggccctggctgtggctgctatccccgagggcctcccagcagtcatcactacatgcctagcactgggcacaagacgtatggcacgtaagaacgccattgtgcggagcctgccctctgtggagaccctgggctgcacctcagtcatctgctctgacaagacagggacactcaccaccaatcaaatgtctgtctgcaggatgttcgtggtagctgaagcagaggcaggcgcctgtcgtttacacgaattcaccatttcgggtaccacgtataccccagagggcgaagtgaggcaaggggaacagcttgtgcgctgtgggcagtttgatggacttgtggagctcgcaaccatctgtgcactctgcaatgattctgcactggactacaatgaggccaagggtgtgtatgagaaggtaggagaggccacagagacagccctcacttgcctggtagagaagatgaacgtgtttgacacagacctgaaaggactgtcgcgggtcgagcgcgctggtgcctgcaattccgtcatcaagcaactcatgcagaaggagttcaccctcgaattctcccgggaccggaagtccatgtctgtgtactgcacacccactcgtgctgaccccaaggcccagggcagcaagatgtttgtgaagggagctcctgagagtgtaattgagcgctgcagctcagtccgcgtgggaagccgaacagtacccctaagcgccacctccagagagcatatcctggccaagatccgagactggggctcaggctctcatacattgcgctgcttagcactggccaccagggacacacccccaaggaaggaggacatgcaactggatgactgcagtcagtttgtacagtacgagacaggcctgaccttcgtgggctgcgtgggcatgttagacccaccgagaccagaggtggctgcctgtatcacacgctgttctcgggcgggcattcgagtggtcatgatcacaggggacaacaaagggacagctgtggccatctgccgccgacttggcatctttggggatacggaggatgtgttgggcaaggcttacacgggccgagaattcgatgacctcagcccagagcagcagcgccaggcttgccgtaccgcccgatgctttgcccgtgtggaacccgcacataagtctcgcatcgtggagaacctccagtcctttaatgagatcaccgccatgactggcgatggggtgaatgatgcaccagccctgaagaaggcagagatcggcatcgccatgggctcaggcactgctgtggccaagtcggcagcggagatggttctgtctgatgacaactttgcctccattgtggctgcagtggaggagggcagggccatctacaacaacatgaagcaattcatccgctacctcatctcctccaatgttggcgaggttgtctgcatcttcctcacagcaattctgggcctgcccgaagccctgatccctgtgcagctgctctgggtgaacctggtaacagatggcttacctgccacagcccttggcttcaacccacccgatctggacatcatggaaaagctgcctcggaacccccgggaggctctcatcagcggctggctttttttccgctatttggctattggagtgtacgtaggcctggctacagtggctgccgccacctggtggttcctgtatgacgctgagggaccacaagtcaccttccatcagctgaggaacttcctgaagtgctctgaagacaatccactgtttgccggcatcgactgcgaggtctttgagtcacgcttccccacgaccatggccttatctgtgcttgtgaccattgaaatgtgcaacgcccttaacagcgtctcagagaaccagtcactgctgcgtatgccaccctggctgaacccttggctgctgggggctgtggtcatgtccatggccctgcattttctcatccttttggtgccgcctctgcccctcattttccaggtgaccccactgagtggtcgacagtggggggtggtgcttcagatgtctctgcctgtcatcctgcttgacgaggccctcaagtatctgtccaggcatcacgtggatgaaaaaaaggacctgaagtaaatcctgagagcagaggggggtctccagttcggccctcggactcatcatgtccaagcacttgtcctggtcccacccctgcctcctcactcagccacctgtctcctgctgaacgtaacaggcctgaaacaacaccggccatttctaggccctgttccagggtcctgtctccattcctgtcctccctacagctctggcccagaagttgagcccaggaggggaagctgagaagccagagctgcctgaagggccaccacccatttcccccacagatctgcagccttcccctgctcggaggtgggcatttgcttggtagctagtgcctctgccctgatggagggctcatgggggccgtcttactgactctgacctcttgcttagtttgggtctggagcctggtcagctctgggaaggaggagtccgaggggaccatctgggtccagctgtgaacatgaggggcagccccttccacttggctcagcttccaccaagtccactcctgtgtctgtttatgtatctgctggccccagggagttgaaggatcacagacagataggaacataaggagcagcgggggcaggcctggacaaggactcctttcccaggagtcagcctccactggctggctgggctcagcactagtcccaccttgaggctcacttcctcggctcaggttggctcagggatcctaactttacagtccatgcccctggtgcctgagactccaggcatccctgggtccatgtcagcttctcctgccacgaagcctggggtgataccgtgtcacttgctgcagggctgggtgattctaaacctcctggacccctggcattactctttgccctcttttcctatcatgcatgtctgagtcagagagatgtcactaggaagtgactccacaatcctcccctacctccccactgaaaggaagcatctgatgggggtctatcagatgaatgtgtattggtctttgggatcttttttgcctcttaaccctgctgttgctcctttgacaaaagctagctaagcatcatgggaaacggagaaagcgcctgtcagtgtgacttagctcttccctgactgtgtataatatgattattttatatgtaaatcaaggttcacatcactgtcctgacacctggtagcaaaagtcccctcagcctacccagaagacagatgaactccatgtatacctgcccactctcctgcccatcctccctcccctctggcaggttctggaggggcctcagagagaaaccgagtttggagggatggcttggcaggaacagagccctgtgcccacttgctgatcatttcttgtggagaaataaaggcgtgcgtctg

SEQ ID NO: 2457 - protein, 999 aa, Rattus norvegicus
  ref <308>: DATABASE ACCESSION NUMBER: Refseq / NP_037046
  ref <309>: DATABASE ENTRY DATE: 2003-01-14
MEEAHLLSAADVLRRFSVTAEGGLTLEQVTDARERYGPNELPTEEGKSLWELVVEQFEDLLVRILLLAALVSFVLAWFEEGEETTTAFVEPLVIMLILVANAIVGVWQERNAESAIEALKEYEPEMGKVIRSDRKGVQRIRARDIVPGDIVEVAVGDKVPADLRLIEIKSTTLRVDQSILTGESVSVTKHTDAIPDPRAVNQDKKNMLFSGTNIASGKALGVAVATGLHTELGKIRSQMAAVEPERTPLQRKLDEFGRQLSHAISVICVAVWVINIGHFADPAHGGSWLRGAVYYFKIAVALAVAAIPEGLPAVITTCLALGTRRMARKNAIVRSLPSVETLGCTSVICSDKTGTLTTNQMSVCRMFVVAEAEAGACRLHEFTISGTTYTPEGEVRQGEQLVRCGQFDGLVELATICALCNDSALDYNEAKGVYEKVGEATETALTCLVEKMNVFDTDLKGLSRVERAGACNSVIKQLMQKEFTLEFSRDRKSMSVYCTPTRADPKAQGSKMFVKGAPESVIERCSSVRVGSRTVPLSATSREHILAKIRDWGSGSHTLRCLALATRDTPPRKEDMQLDDCSQFVQYETGLTFVGCVGMLDPPRPEVAACITRCSRAGIRVVMITGDNKGTAVAICRRLGIFGDTEDVLGKAYTGREFDDLSPEQQRQACRTARCFARVEPAHKSRIVENLQSFNEITAMTGDGVNDAPALKKAEIGIAMGSGTAVAKSAAEMVLSDDNFASIVAAVEEGRAIYNNMKQFIRYLISSNVGEVVCIFLTAILGLPEALIPVQLLWVNLVTDGLPATALGFNPPDLDIMEKLPRNPREALISGWLFFRYLAIGVYVGLATVAAATWWFLYDAEGPQVTFHQLRNFLKCSEDNPLFAGIDCEVFESRFPTTMALSVLVTIEMCNALNSVSENQSLLRMPPWLNPWLLGAVVMSMALHFLILLVPPLPLIFQVTPLSGRQWGVVLQMSLPVILLDEALKYLSRHHVDEKKDLK

SEQ ID NO: 2458 - DNA, 4553 bp, Homo sapiens
  ref <308>: DATABASE ACCESSION NUMBER: Refseq / NM_005173
  ref <309>: DATABASE ENTRY DATE: 2003-02-13
ggcggcatggaggcggcgcatctgctcccggccgccgacgtgctgcgccacttctcggtgacagccgagggcggcctgagcccggcgcaggtgaccggcgcgcgggagcgctacggccccaacgagctcccgagtgaggaagggaagtccctgtgggagctggtgctggaacagtttgaggacctcctggtgcgcatcctgctgctggctgcccttgtctcctttgtcctggcctggttcgaggagggcgaggagaccacgaccgccttcgtggagcccctggtcatcatgctgatcctcgtggccaacgccattgtgggcgtgtggcaggaacgcaacgccgagagtgccatcgaggccctgaaggagtatgagcctgagatgggcaaggtgatccgctcggaccgcaagggcgtgcagaggatccgtgcccgggacatcgtcccaggggacattgtagaagtggcagtgggggacaaagtgcctgctgacctccgcctcatcgagatcaagtccaccacgctgcgagtggaccagtccatcctgacgggtgaatctgtgtccgtgaccaagcacacagaggccatcccagaccccagagctgtgaaccaggacaagaagaacatgctgttttctggcaccaatatcacatcgggcaaagcggtgggtgtggccgtggccaccggcctgcacacggagctgggcaagatccggagccagatggcggcagtcgagcccgagcggacgccgctgcagcgcaagctggacgagtttggacggcagctgtcccacgccatctctgtgatctgcgtggccgtgtgggtcatcaacatcggccacttcgccgacccggcccacggtggctcctggctgcgtggcgctgtctactacttcaagatcgccgtggccctggcggtggcggccatccccgagggcctcccggctgtcatcactacatgcctggcactgggcacgcggcgcatggcacgcaagaacgccatcgtgcgaagcctgccgtccgtggagaccctgggctgcacctcagtcatctgctccgacaagacgggcacgctcaccaccaatcagatgtctgtctgccggatgttcgtggtagccgaggccgatgcgggctcctgccttttgcacgagttcaccatctcgggtaccacgtatacccccgagggcgaagtgcggcagggggatcagcctgtgcgctgcggccagttcgacgggctggtggagctggcgaccatctgcgccctgtgcaacgactcggcgctggactacaacgaggccaagggtgtgtacgagaaggtgggagaggccacggagacagctctgacttgcctggtggagaagatgaatgtgttcgacaccgacctgcaggctctgtcccgggtggagcgagctggcgcctgtaacacggtcatcaagcagctgatgcggaaggagttcaccctggagttctcccgagaccggaaatccatgtccgtgtactgcacgcccacccgccctcaccctaccggccagggcagcaagatgtttgtgaagggggctcctgagagtgtgatcgagcgctgtagctcagtccgcgtggggagccgcacagcacccctgacccccacctccagggagcagatcctggcaaagatccgggattggggctcaggctcagacacgctgcgctgcctggcactggccacccgggacgcgcccccaaggaaggaggacatggagctggacgactgcagcaagtttgtgcagtacgagacggacctgaccttcgtgggctgcgtaggcatgctggacccgccgcgacctgaggtggctgcctgcatcacacgctgctaccaggcgggcatccgcgtggtcatgatcacgggggataacaaaggcactgccgtggccatctgccgcaggcttggcatctttggggacacggaagacgtggcgggcaaggcctacacgggccgcgagtttgatgacctcagccccgagcagcagcgccaggcctgccgcaccgcccgctgcttcgcccgcgtggagcccgcacacaagtcccgcatcgtggagaacctgcagtcctttaacgagatcactgctatgactggcgatggagtgaacgacgcaccagccctgaagaaagcagagatcggcatcgccatgggctcaggcacggccgtggccaagtcggcggcagagatggtgctgtcagatgacaactttgcctccatcgtggctgcggtggaggagggccgggccatctacagcaacatgaagcaattcatccgctacctcatctcctccaatgttggcgaggtcgtctgcatcttcctcacggcaattctgggcctgcccgaagccctgatccctgtgcagctgctctgggtgaacctggtgacagatggcctacctgccacggctctgggcttcaacccgccagacctggacatcatagagaagctgccccggagcccccgagaagccctcatcagtggctggctcttcttccgatacctggctatcggagtgtacgtaggcctggccacagtggctgccgccacctggtggtttgtgtatgacgccgagggacctcacatcaacttctaccagctgaggaacttcctgaagtgctccgaagacaacccgctctttgccggcatcgactgtgaggtgttcgagtcacgcttccccaccaccatggccttgtccgtgctcgtgaccattgaaatgtgcaatgccctcaacagcgtctcggagaaccagtcgctgctgcggatgccgccctggatgaacccctggctgctggtggctgtggccatgtccatggccctgcacttcctcatcctgctcgtgccgcccctgcctctcattttccaggtgaccccactgagcgggcgccagtgggtggtggtgctccagatatctctgcctgtcatcctgctggatgaggccctcaagtacctgtcccggaaccacatgcacgaagaaatgagccagaagtgagcgctgggaacagggtggagtctccggtgtgtacctcagactgatggtgcccatgtgttcgcctccgccccccacccttgccaccacactcgcccacttgcccaccgggtcccgccggataaatgacaggcccgaggtcagaatggccatccccgggccccgtcctggggtctctgtccccacttccttctggcctgggaggtctgtaattcctgtctcctggactctcctgggaagttccctgctctgcagctctggcccaggagctgcaggctgggagggggcagccaagaagccggagctggcagcatacccagagatccggggcccccccacccccaaatcacgagtgcagctggagcttgctcccccttgttcggaagctggacgttcacttggtgactggtgcctctgcactgacggaggactctgggggtccttcttaccggctctgacctctctcttcgtgcctggtctgggactgggtcagccctgggggatcagaaggggccatctgggcccagctgtgtacagcgagggtgggcagccccctccactccactctgcttccacaaagtcggctcccgagagctcgaggctgcttctgtttatatgtgcagggcccgggccggtgaagggtcagagagacggacacaaggagccggcaggagggcggagcgaggatgtcctttcccgggagacaagtcgggaaagcctggctggactgcctcagccccgcgcgcctcctggactcagggttccccgtcctgagctcgggagatgttcagagtcacactgccgcccggtctgccacgcagaggtccaacttgccacccgcgtccctggtacctgagaccaccgacatcctcaggttcctgaccgtggcgcccttctacccagcccagtgtgcggccgccgcgctgtctgcacagctgggggcctctgagcctggtgggcttcctggactcttggcctcactccttgccccctccccacgacacccatgagccgaaaggatgtcactaaggatggctgattccccaagggcacccgctctccctccctccctgctggaggaacacgtcatatcagatgagaggaagatggcctctgatggacagaatttttctcttaactcagcttttgctactttggcaaaaactagcgaggggtagcagaaacctgcaccaaggattgtccctatgtcttggcccctcctagagcgtgtgcagactgatgattttatatgtaaatcaagactcacatccctttcctagtcccccacatccaaagcccctcagcctgccttgcagaccaatgggctccatgttctgtagccccctcccctacgcctcacccctcctccctctcacaggttctgggcggccagtgagagaaacgcagtgggggaggcagggagtctggtgcctgcagagattctctgcttctttcctggggggaggtggggaggtcttagcaggagcgggccctgtacccacctgctgacctgctgtttggtagagaaataaaggttgtgtgactggggg

SEQ ID NO: 2459 - protein, 999 aa, Homo sapiens [sequence omitted]

SEQ ID NO: 2460 - DNA, 1342 bp, Rattus norvegicus
  ref <308>: DATABASE ACCESSION NUMBER: EMBL / AJ005424
  ref <309>: DATABASE ENTRY DATE: 1998-10-02
ccgacaataccaaagcagccctcaaagctgctctgctcaagtccctgaggagccggcttcgagatgggcccagtgcacccttggaggcccctgaacctcgaaagcctgtgacagctcaggaacgtcagcgagagcgagaagagaagcgcaggaggcgacaagagagagccaaggagagggagaagcgacgacaagagcgggagcgcaaggagaggggggctggcaccttggggggcccctctactgaccctttggctggattggtgctcagtgacaatgaccgaagcctgctagagcggtggactcgcatggctaggcctcctgtccctgcaccagcaccagcaccagcaccagcaccaacaccaacaccaacaccaacaccaacaccaacacagtcctctgctcaacccactagtcctcccaatggccctgtatctcagactactgctcctctacagcctgcaggctctattcctggtcctgcctcccagcctgcttgcccaccccctgggcctgttccccagcctgctggccctgtccctgcccctctccagactgccccttccactagccttttggcctcccagtcacttgtgccacctagtgggttgcctggttctggtgccccagaagttctgccttacttcccatctggcccaccacctccagatcctgggctcacccctcagccttctacatcagagtcacctgatgtcaacctggtgacccagcaactgtccaagtctcaggtggaggaccccctgcctcccgtgttctcaggcactccaaagggcagtggggctggctacggtgttggctttgacctggaggaattcttaaaccaatcttttgacatgggtgtggctgatgggccacaggatagccaggcagactcagcctcactctcagcctccctccttgctgactggcttgagggccacggcatgaaccccgctgacattgagtctctgcagcgtgagatccagatggactccccaatgttgctgtctgacctgcctgacctccaagaaccctgagacccacagcttgtgccttgctgccaggacgggcccagcttcaaggtccaggggtgcagtccagagggctgcagccttgagcctggcaggtgaggctcagcttgagttactctgcaggttcatctcagacccaccgttcagccttaagcagccgcctgagccaccaccgagccataacaggatgggaggctctactccttcctgcgcagtcttctccagtgttgtatttttattactgttgtaatatgcatttgttttgccatcgaaatgaggcctgtgaaatacaaggtttcctttaaaaaaaa

SEQ ID NO: 2461 - DNA, 2048 bp, Rattus norvegicus
  ref <308>: DATABASE ACCESSION NUMBER: Refseq / NM_031010
  ref <309>: DATABASE ENTRY DATE: 2003-01-13
gggagaaatcatctgcaagatgggtgtctaccgcatccgcgtctccaccggagactccaagtacgcgggctccaacaacgaggtctacctgtggttggttggacagcatggagaggcatctctcgggaagctgctacgaccctgtcgggactcggaagcagaattcaaagtggatgtgtcagaataccttgggccactgctgttcgtaagagtgcagaaatggcattatctcacggatgacgcctggttctgcaactggatttctgtgaagggccccggagaccaaggatcagagtacatgttcccctgttaccgatgggttcagggcagaagcatcctgagcctccctgagggcactggctgcaccgtggttgaagattctcaaggactgttcaggaaacatagggaagaggagcttgaagagaggaggagtctgtacaggtggggcaactggaaggatggctcaatcctgaatgtggcggcggccagtatatctgacctccctgtagaccaacgatttcgagaggacaaaagaattgaatttgaagcttcacaggttataggggtaatggatactgttgtcaactttcctataaacactgtgacctgctggaaaagcctagatgacttcaactgcgttttcaagagtggccataccaaaatggctgagcgggttcgaaactcctggaaggaagatgcgttctttgggtaccaattcctcaatggtgctaaccccatggtgctgaagcgctctacttgtcttcctgcccgcctggtattccctccaggaatggagaagctacaggcccagctgaacaaggagctccagaaaggcactctgtttgaagcggatttcttccttctggatgggatcaaggccaatgtcatcctttgtagccagcagtacctggctgcccctctcgtcatgctgaagctgatgcctgatggacaactcttgcccatagccatccagcttgaactgcccaaaactgggtctactccaccacctattttcacgccctcggatcccccaatggactggctcctagccaaatgctgggtccggagctccgacttacagctccatgagctgcaggctcatcttctgaggggacacttgatggctgagctctttgctgtggccaccatgaggtgcctgccttccgtgcaccctgtttttaagcttctagttcctcatctgctttacaccatggaaattaatgtccgggccaggagtgacctgatctcagagagaggcttttttgacaaggcaatgagcacaggtgggggaggccacctggatcttctcaagcaagctggagcctttctgacctattgctcattgtgtccccccgatgacttggctgagcgaggactcttggatatcgagacttgcttctatgctaaagacgccctgcgactctggcagatcatgaatcggtacgtggtgggaatgttcaatctccactacaagaccgacaaagctgtgcaagacgactatgaactgcagagctggtgtcgagagatcactgacattggtcttcaaggggcccaggacagaggcttccctacctctcttcagtcccgggctcaggcttgctacttcatcaccatgtgcatcttcacgtgcaccgcacagcactcttccgtccatcttggccagctggattggttctactgggttcctaatgcaccctgcaccatgcggctgccaccacccaccaccaaggaagcaacaatggagaagctgatggctacactgcccaaccctaatcagtctactctccagataaatgtcgtttggctcctgggcagacgccaggctgttatggtgcccctgggccagcattcagaggaacactttccaaaccctgaggccaaggctgtgctgaagaagttcagagaggaactggctgccttggataaggaaattgagattcgtaataagagcttggacataccttatgagtacctgcggcccagcatggtggaaaacagcgtggccatatgagcatccccagactcctgctttgttgtttagttaagac

SEQ ID NO: 2462 - protein, 663 aa, Rattus norvegicus
  ref <308>: DATABASE ACCESSION NUMBER: Refseq / NP_112272
  ref <309>: DATABASE ENTRY DATE: 2003-01-13
MGVYRIRVSTGDSKYAGSNNEVYLWLVGQHGEASLGKLLRPCRDSEAEFKVDVSEYLGPLLFVRVQKWHYLTDDAWFCNWISVKGPGDQGSEYMFPCYRWVQGRSILSLPEGTGCTVVEDSQGLFRKHREEELEERRSLYRWGNWKDGSILNVAAASISDLPVDQRFREDKRIEFEASQVIGVMDTVVNFPINTVTCWKSLDDFNCVFKSGHTKMAERVRNSWKEDAFFGYQFLNGANPMVLKRSTCLPARLVFPPGMEKLQAQLNKELQKGTLFEADFFLLDGIKANVILCSQQYLAAPLVMLKLMPDGQLLPIAIQLELPKTGSTPPPIFTPSDPPMDWLLAKCWVRSSDLQLHELQAHLLRGHLMAELFAVATMRCLPSVHPVFKLLVPHLLYTMEINVRARSDLISERGFFDKAMSTGGGGHLDLLKQAGAFLTYCSLCPPDDLAERGLLDIETCFYAKDALRLWQIMNRYVVGMFNLHYKTDKAVQDDYELQSWCREITDIGLQGAQDRGFPTSLQSRAQACYFITMCIFTCTAQHSSVHLGQLDWFYWVPNAPCTMRLPPPTTKEATMEKLMATLPNPNQSTLQINVVWLLGRRQAVMVPLGQHSEEHFPNPEAKAVLKKFREELAALDKEIEIRNKSLDIPYEYLRPSMVENSVAI

SEQ ID NO: 2463 - DNA, 474 bp, Rattus norvegicus
  ref <308>: DATABASE ACCESSION NUMBER: EMBL / AA893634
  ref <309>: DATABASE ENTRY DATE: 2000-03-03
ggttgctggagaacatggacggagccttcttggtgctggatgaaattgttgatggaggtgtgatcctggagagtgacccccagcaagtgatccagaaagtgaattttaggactgatgacagtggcctaacagaacagagcgtggcccaggttcttcagtcagccaaggaacaaattaagtggtcgttattgaaatgaagaccttggagtcaaggctcctttcccagagaacctttgccggtccctgcgtaagccccaaaatgtcaagaggcaagagagaccaccctgccttctccggcctctctccctgaggcctcgtgccagggattctgagacccaaaagcttggccccagttctgtcatccttgctcagcgtcccggcctgcccctggggtcatgggaaccagcaaaattgcctccccttggacctctgacatctcagtcctaggacttaataaacttccaatttttcccc

SEQ ID NO: 2464 - DNA, 914 bp, Homo sapiens
  ref <308>: DATABASE ACCESSION NUMBER: Refseq / NM_016429
  ref <309>: DATABASE ENTRY DATE: 2002-12-23
ggcggcgagcggaatgcagcggcccgaggcctggccacgtccgcacccgggggagggggccgcggcggcccaggccgggggcccggcgccgcctgctcgagccggggagccctcggggctgcggttgcaggaaccttccctctacaccatcaaggctgttttcatcctagataatgacgggcgccggctgctggccaagtattatgatgacacattcccctccatgaaggagcagatggttttcgagaaaaatgtcttcaacaagaccagccggactgagagtgagattgcattttttgggggtatgaccatcgtctacaagaacagcattgacctcttcctatacgtggtgggctcatcctacgagaatgagctgatgctcatgtctgttctcacctgcctgtttgagtctctgaaccacatgttaaggaagaacgtggagaagcgctggttgctggagaacatggacggagccttcttggtgctggacgagattgtggatggcggtgtgattctggagagtgacccccagcaagtgatccagaaggtgaattttagggcagatgatggcggcttgactgaacagagtgtggcccaggttcttcagtctgccaaggaacaaattaaatggtcgttattgaaatgaaggctgtggattcaaggctccctgccccccagaccatttccccaatcctggcaaaagcccaaagatcccagggtcaggagagacccctctgtatccccaggtccctcccagaactgactcctaaggtctccagccagggcttctgagatgcaaaggtttggcctcaggagagtcaccttttctcacggccctggccttaactcatatcttaggcattcctggccccagggccctaataaacctgcttttgtcttctgcaaaaaaaaaa

SEQ ID NO: 2465 - protein, 210 aa, Homo sapiens
  ref <308>: DATABASE ACCESSION NUMBER: Refseq / NP_057513
  ref <309>: DATABASE ENTRY DATE: 2002-12-23
MQRPEAWPRPHPGEGAAAAQAGGPAPPARAGEPSGLRLQEPSLYTIKAVFILDNDGRRLLAKYYDDTFPSMKEQMVFEKNVFNKTSRTESEIAFFGGMTIVYKNSIDLFLYVVGSSYENELMLMSVLTCLFESLNHMLRKNVEKRWLLENMDGAFLVLDEIVDGGVILESDPQQVIQKVNFRADDGGLTEQSVAQVLQSAKEQIKWSLLK

SEQ ID NO: 2466 - DNA, 2157 bp, Rattus norvegicus; identical to SEQ ID NO: 2437
  ref <308>: DATABASE ACCESSION NUMBER: Refseq / NM_019210
  ref <309>: DATABASE ENTRY DATE: 2003-01-14

SEQ ID NO: 2467 - protein, 544 aa, Rattus norvegicus; identical to SEQ ID NO: 2438
  ref <308>: DATABASE ACCESSION NUMBER: Refseq / NP_062083
  ref <309>: DATABASE ENTRY DATE: 2003-01-14

SEQ ID NO: 2468 - DNA, 1635 bp, Homo sapiens; identical to SEQ ID NO: 2439
  ref <308>: DATABASE ACCESSION NUMBER: Refseq / NM_002578
  ref <309>: DATABASE ENTRY DATE: 2002-11-05

SEQ ID NO: 2469 - protein, 544 aa, Homo sapiens; identical to SEQ ID NO: 2440
  ref <308>: DATABASE ACCESSION NUMBER: Refseq / NP_002569
  ref <309>: DATABASE ENTRY DATE: 2002-11-05

SEQ ID NO: 2470 - DNA, 3252 bp, Rattus norvegicus
  ref <308>: DATABASE ACCESSION NUMBER: Refseq / NM_138867
  ref <309>: DATABASE ENTRY DATE: 2003-01-13
tgaggatggagcagcggtcgggccgcggctcctaggggaggcagcgtgctagcttcgggggcgggccagtagcgggagcgagggccgtacggacaccggtcccttcggccttgaagttcaggcgctgagctgccccctcgcgctcggggtgggccggaatccatttctgggagtgggatcttccaccttcatcagggtcacaatggcagctacagtaaggaggcagaggccaaggaggctactctgttgggccttggtggctgtcctcttggcagacctgttggcactgagtgacacactggctgtgatgtctgtggacctgggcagtgaatccatgaaggtggccattgtcaagcctggagtgcccatggagattgtattgaacaaggaatctcggaggaaaactccggtgactgtgaccttgaaggaaaacgaaaggtttctaggtgacagtgcagctggcatggccatcaagaacccaaaggctacgctccgttatttccagcacctccttggaaagcaggcagataaccctcatgtggctctttaccggtcccgtttcccagaacatgagctcaatgttgacccacagaggcagactgtgcgcttccagatcagtccgcagctgcagttctctcccgaggaggtgctgggcatggttctcaactactcccgttccctggctgaagattttgcagaacaacctattaaggatgcagtgatcaccgtgccagcctttttcaaccaggccgagcgccgagctgtgctgcaggctgctcgtatggctggcctcaaggtgctgcagctcatcaatgacaacactgccacagccctcagctatggtgtcttccgccggaaagatatcaattccactgcacagaatatcatgttctatgacatgggctcgggcagcactgtgtgtaccatcgtgacctaccaaacggtgaagactaaggaggctgggacgcagccacagctacagatccggggcgtgggatttgaccgcaccctgggtggcctggagatggagcttcggctgcgagagcacctggctaagctcttcaatgagcagcgcaagggccagaaagccaaggatgttcgggaaaacccccgagccatggccaaactgcttcgggaagccaatcggcttaaaaccgtcctgagtgccaatgctgatcacatggcacagattgaaggcttgatggacgatgtggacttcaaggcaaaagtaactcgagtggagtttgaggagctgtgtgcagatttgtttgatcgagtgcctgggcctgtacagcaggccctgcagagtgctgagatgagcctggatcaaattgagcaggtgatcctggtgggtgggcccactcgtgttcccaaagttcaagaggtgctgctgaagcctgtgggcaaggaggaactaggaaagaacatcaatgccgatgaagcagctgccatgggggccgtgtaccaggcagcggcactgagcaaagccttcaaagtgaagccatttgttgtgcgtgatgctgttatttaccccatcctggtggagttcacaagggaggtggaggaggagcctgggcttcgaagcctgaagcacaataaacgtgtgctcttctcccgaatggggccctaccctcagcgcaaagtcatcacctttaaccgatacagccatgatttcaactttcacatcaactacggtgacctgggcttcctggggcctgaggatcttcgggtatttggctcccagaatctgaccacagtgaaactaaaaggtgtgggagagagcttcaagaaatatcctgactatgagtccaaaggcatcaaggcccactttaacctagacgagagtggagtgctcagtttagacagggtggagtccgtattcgagaccctggtggaggacagcccagaggaagagtctactcttaccaaacttggcaacaccatttccagcctgtttggcggtggtacctcatcagatgccaaagagaatggtactgatgctgtacaggaggaggaggagagccctgctgaggggagcaaggatgagcctgcagaacagggggaactcaaggaggaagctgaagccccaatggaggatacctcccagcctccaccctctgagcctaagggggatgcagcccgtgagggagaaacacctgatgaaaaagaaagtggggacaagtctgaggcccagaagcccaatgagaaggggcaggcagggcctgagggtgtccctccagctcccgaggaagaaaaaaagcagaaacctgcccggaagcagaaaatggtggaggagataggtgtggaactggctgtcttggacctgccagacttgccagaggatgagctggcccattccgtgcagaaacttgaggacttgaccctgcgagaccttgaaaagcaggagagggagaaagctgccaacagcttagaagcttttatctttgagacccaggacaaactgtaccaacctgagtaccaggaagtgtccactgaggaacaacgggaggagatctctggaaaactcagtgccacttctacctggctggaggatgagggatttggagccaccactgtgatgttgaaggacaagctggctgagctgagaaagctgtgccaagggctgttttttcgggtggaagagcgcaggaaatggccagagcggctttcagctctggataatctcctcaatcactccagcattttcctcaagggtgcccgactcatcccagagatggaccagatcttcactgacgtggagatgacaacgttggagaaagtcatcaatgacacctggacctggaagaatgcaaccctggccgagcaggccaagcttcctgccacagagaaacccgtgctgctttcaaaagacatcgaggccaaaatgatggccctggaccgggaggtgcagtatctactcaataaggccaagtttactaaaccccggccacggcccaaggacaagaatggcacccggacagagcctcccctcaatgccagtgctggtgaccaagaggaaaaggtcattccacctacaggccagactgaagaggcgaaggccatcttagaacctgacaaagaagggcttggtacagaggcagcagactctgagcctctggaattaggaggtcctggtgcagaatctgaacaggcagagcagacagcagggcagaagcggcctttgaagaatgatgagctgtgaccccgcgcctccgctccacttgcctccagccccttctcctaccacctcta

SEQ ID NO: 2471 - protein, 999 aa, Rattus norvegicus
  ref <308>: DATABASE ACCESSION NUMBER: Refseq / NP_620222
  ref <309>: DATABASE ENTRY DATE: 2003-01-13
MAATVRRQRPRRLLCWALVAVLLADLLALSDTLAVMSVDLGSESMKVAIVKPGVPMEIVLNKESRRKTPVTVTLKENERFLGDSAAGMAIKNPKATLRYFQHLLGKQADNPHVALYRSRFPEHELNVDPQRQTVRFQISPQLQFSPEEVLGMVLNYSRSLAEDFAEQPIKDAVITVPAFFNQAERRAVLQAARMAGLKVLQLINDNTATALSYGVFRRKDINSTAQNIMFYDMGSGSTVCTIVTYQTVKTKEAGTQPQLQIRGVGFDRTLGGLEMELRLREHLAKLFNEQRKGQKAKDVRENPRAMAKLLREANRLKTVLSANADHMAQIEGLMDDVDFKAKVTRVEFEELCADLFDRVPGPVQQALQSAEMSLDQIEQVILVGGPTRVPKVQEVLLKPVGKEELGKNINADEAAAMGAVYQAAALSKAFKVKPFVVRDAVIYPILVEFTREVEEEPGLRSLKHNKRVLFSRMGPYPQRKVITFNRYSHDFNFHINYGDLGFLGPEDLRVFGSQNLTTVKLKGVGESFKKYPDYESKGIKAHFNLDESGVLSLDRVESVFETLVEDSPEEESTLTKLGNTISSLFGGGTSSDAKENGTDAVQEEEESPAEGSKDEPAEQGELKEEAEAPMEDTSQPPPSEPKGDAAREGETPDEKESGDKSEAQKPNEKGQAGPEGVPPAPEEEKKQKPARKQKMVEEIGVELAVLDLPDLPEDELAHSVQKLEDLTLRDLEKQEREKAANSLEAFIFETQDKLYQPEYQEVSTEEQREEISGKLSATSTWLEDEGFGATTVMLKDKLAELRKLCQGLFFRVEERRKWPERLSALDNLLNHSSIFLKGARLIPEMDQIFTDVEMTTLEKVINDTWTWKNATLAEQAKLPATEKPVLLSKDIEAKMMALDREVQYLLNKAKFTKPRPRPKDKNGTRTEPPLNASAGDQEEKVIPPTGQTEEAKAILEPDKEGLGTEAADSEPLELGGPGAESEQAEQTAGQKRPLKNDEL

SEQ ID NO: 2472 - DNA, 1229 bp, Rattus norvegicus
  ref <308>: DATABASE ACCESSION NUMBER: EMBL / M31433
  ref <309>: DATABASE ENTRY DATE: 2000-03-04
aagcttggacactccaggagagcctgtaattgggtttcagaaccacggacagcaccagagtctctgaattggttcctgaccctgcttgacgaagttggttttgagaaaaagacagatctgcctttttttaaaatttcaagtggtttatgacccaagactcataaaaaattgtagaaaattaagtaagtaaactaatatatattgaacagatcatatattcagcctaattttggttttctcatttgcttaccaactgggaaaccttgaattgtgctcctaccctcctaaacaggctttcacttcggactatagtgtagcacaattattacatttcagattccctatacggtttgaaatgtttcagaaagtttgattgactgagattgttgtcttttcataatttcgtcattctcttaacaacaagcatatttcttttttttgaatattcttttttttattttattttatttttattaccttgagtatttcttatatacatttcaagtgttattccctttcccggtttccggacagacatcaccctcccccctccccttccttgtgggtgttcccctcccaaacctccccccattgccaccctccccgcatagtctagttcactgggggttcagtcttagcaggacccagggcttccccttccactggtaacaagcatatttcttatgacaattatactactccacaaagagaggaccaataatggcatgattaataattccaattattttcatatagcacttttcagtaatgttctgaaaactcagatttcacgtacacataataataacaaatcaaactccaaatgttaaactacgtttttaaaaatgcaaagtataatgactttcaaatgcttagtttgtaactaaccagagtagttgagttcgaatacattagaattctgaagtatacaccatttagttttatttgttgaatgttgctttgccagaggaagttgaattgcagtaattccacttgtgaccaggagatggagctgtcgcgcaagacgctaccttcctccatttatttatttatttattttaatttagcatgctgttttctgacagtgggtaccatcgggtgagtgagtgtcagaacagaaagctaaggcagaagcagagagattgcagtgatcgccctgtctttgcttttcctctttagtaaggatattattgcacatgtgagatttttacttcctactgtaggctgaa

SEQ ID NO: 2473 - DNA, 155 bp, Rattus norvegicus
  misc_feature (1)..(155): n=a, c, g or t
  ref <308>: DATABASE ACCESSION NUMBER: EMBL / AA685152
  ref <309>: DATABASE ENTRY DATE: 2000-03-08
caaaatccgagggcactcctgagcgtttcgggaaccggctggaaagaggagcgggtgggtccggagagtnacccggaagcagaagtnttcctcgccgtggagtgctgggaagcggcagggncagtagcgaccacagcgggagaagcagcanttta

SEQ ID NO: 2474 - DNA, 498 bp, Rattus norvegicus
  ref <308>: DATABASE ACCESSION NUMBER: EMBL / AA860029
  ref <309>: DATABASE ENTRY DATE: 2000-03-03
aagtatagctggcagccgctgcgggcgcgatcccatgcccccaggagacatgcacagatcctgggggaccccctagaacttacatctgttcacctgctgaccagagcctttagttactgtcaagctgaaggagctgagccccagcgtgctatagcgtcccatcctgcgccatcctgaccttctcgatagtccgcatccaacaggctcttccccaggcaaggactccatcctccaataaatcacttcgctgtcagcttgagtctgtgaaagtgagatttttatctgtgactgtggtcaagtgctgttttaggtaggacgctttgttgcatctgtgaaaggctctctggataagtgagaatggggcgttaggcgtgtcccctcacacgtgactcttcggagtattaaagccatacagctatgctgtacctgcatgttgggtcagaagatcaaagaactggttcatctgccttattaataaagttattatgcacctccctc

SEQ ID NO: 2475 - DNA, 568 bp, Rattus norvegicus
  ref <308>: DATABASE ACCESSION NUMBER: EMBL / AA891222
  ref <309>: DATABASE ENTRY DATE: 2000-03-03
tactgaaagcctagaggtgccatttcacggtttctcgttcttaagcacgacatgacatacttaatcattctttgagactgattattttagctaaatttggggatatggcatggggcaggaagatgtgcactgagagatttctaagcacatctgtttaagcagactttgaaaatctctggcccgaaggtaagttgctgtgtcctcggagttgtctgcgtccagggaatatgtccgagaatacgcctttgtaatggaggtcggctttgccatttctaactgcaaacagaacagaaggggtgccataaattcacagcatactgttctcaacatactgtaatccaaaagggtttcaatgtgtctgtatgagagtgcgtgtgtttctaaggtcagtagagggtgttcttcaacttggtcagtagaaataggcatcgagtgtgaccaggcgaggtgtggaaagccttgcgaggagacgcttatgagttctgtgccaggtccttcaccactgtgtactttattgctatttaaaactgtatcaactctaacgaaagaataaattatttgtgatttt

SEQ ID NO: 2476 - DNA, 613 bp, Rattus norvegicus
  misc_feature (1)..(613): n=a, c, g or t
  ref <308>: DATABASE ACCESSION NUMBER: EMBL / AA800016
  ref <309>: DATABASE ENTRY DATE: 2000-03-03
gaaacagtcaaaatctagtcaggtagctcttatgacaataatcaaaattaattttataactttagcaatatatatcgaacacttacattcaagtgtatagaacacaatccattaaatcttgaaaaacactgtaacaaggcttgaaatgactgcacggtggcaatctagcgttcctctgcccattctacagttatgggaaactcagctctgtaaacacagccagcaaatcacagcactggagcggtcagttgctctgacatgccctgccatagttttgacagtagagggaaacaattcttacaacattacttaaaaatagatcttagcgatgactcatccttatgtacacacattatgctaacctgtcacagacagtaaatgtcagatttatacactggactctgtggagcaccctacacatttagaacttactatgaaaataaacaaacggctgtcaaatgtctctggatggtctgctccacctgngaggatgganggctgctctgaagcactgcgctcactgctgcttctcaaaggcaaannacangtaaatgcttgtagctttccagtctgactttactaacgttcccagaggtaaactttactgactggt

SEQ ID NO: 2477 - DNA, 6203 bp, Homo sapiens
  ref <308>: DATABASE ACCESSION NUMBER: Refseq / NM_003799
  ref <309>: DATABASE ENTRY DATE: 2000-11-01
aacagaatcgcgtttggctgtgctggatgtgtgaacctattgggtactgtacaacttcaagcctcgaaatcagataggcaccaccaacctcatttcctgtttcaccttgattttctgtgataccaaaatctcagcttcacaaagtcattgaaagtgttggttcatgaagttttaccatcaattcaagtaatcataaatggcaaattctgcaaaagcagaagaatatgaaaagatgtctcttgaacaggcaaaagcgtcagtgaattctgaaacagagtcttcattcaatattaatgaaaacacaacagcttctgggactgggctttctgaaaagacttctgtctgtaggcaagtagacatagcaagaaagagaaaagagtttgaagatgatcttgtaaaggaaagttctagttgtgggaaagacactccatccaagaagagaaaacttgatcctgaaattgtcccagaggaaaaagattgtggtgatgctgaaggcaattcaaagaaaagaaaaagagaaactgaggatgttccaaaagataaatcttctactggagatggcactcaaaataagagaaaaatagcacttgaggatgttcctgaaaagcagaaaaatctggaagaaggacacagctcaacagtggctgcccattacaatgaacttcaggaagttggtttggagaagcgtagtcaaagtcgtattttttacctaagaaactttaataattggatgaaaagtgttctcattggagaatttttggaaaaggtacgacagaagaaaaaacgtgatatcactgttttggacctgggatgtggtaaaggtggagatttgctgaaatggaaaaaaggaagaattaacaagctagtttgtactgatattgccgatgtttctgtcaaacagtgtcagcagcggtatgaggacatgaaaaatcgtcgtgatagtgaatatattttcagtgcagaatttataactgctgacagctcaaaggaacttctgattgacaaatttcgtgacccacaaatgtgttttgacatctgcagttgtcagtttgtctgtcattactcatttgagtcttatgagcaggctgacatgatgctgagaaatgcgtgtgagagacttagccctgggggctattttattggtactactcccaatagctttgaattgataagacgccttgaagcttcagaaacagaatcatttggaaatgaaatatatactgtgaaatttcagaagaaaggagattatcctttatttggctgcaaatatgacttcaacttggaaggtgttgtggatgttcctgaattcttggtctattttccattgctaaatgaaatggcaaagaagtacaatatgaaactagtctacaaaaaaacatttctggaattctacgaagaaaagattaagaacaatgaaaataaaatgctcttaaaacgaatgcaggccttggagccatatcctgcaaatgagagttctaaacttgtctctgagaaggtggatgactatgaacatgcagcaaagtacatgaagaacagtcaagtaaggttacctttgggaaccttaagtaaatcagaatgggaagctacaagtatttacttggtgtttgcctttgagaaacagcagtgagcacataggcagtagtcccagaggggccgtgttctgtcctgcacaaatttgaacaactcatctcgatatatttgatatttctctgtctgttgattttaattctaaatgtgcaggatgctgccagaaactccaatgtagaaattcaacatttgctgtctgtgacagatgaacttttgcatgtgtatataagaatgagttgggacctctgtctttaaaaatctatttttaggtaatgttctaagaattccatttgcctctatgatcttagctcataaaaatataatatgacttgataaagcaactaaactcttcccacagtgttcagatttgtcctgtgtgtgtttacagtattcaatttattgcagttatagaattggtcagagagcattttcatagtgtgctcatttctatggttttgttatatagcatttttcaacatttaatggtctgtacagttgaatgtaagtgttcaatatgtattgctgaagttataagtttaaaactcaatttcagatgctcataaaagttacttagctaaaattttagcaatttattgcattttgaaataatcattaacatgctgcaattcaggagctggttagaacattttaagtggcagcatagaattttggaattttggggctttcttttcagaaattgctaccatagtaattaatgtttccagttatcaagattgtgattagacacatttacctttcttcattgaacaaatggtgccatagttatttttctcaaaatttagtgaaaatccctcccatgtagacatgttgcacattttttccaaatttatacatggaactgcagtaggaatattctcaccatctgatgccatgtacccacttcagaaataagcaatacttgttcctctgttacaacctcagcactttgcaccgtaggagccattgttaaagttgtcacttgtgtaactgactgcttttccaaaactggtacttacgtgaactgttgtccttgctttacaccaccatttggaaaacttaccagtttttagatgtagatgtagtgaaaaacttcaagaatgaagcagagcaattgagtattcttttttaaattattaagccatgatttacaaaaacattactttctgtaattcacaatacttgttttaaaaacatagtgtcttcattagtgtgcatctattaactgttcatggtgttagagttgcaaactttttagcaagaaaatatggatttcctcatttcagttccttctgcagcctgtgaatctccacaaagtgttaccagtttacaaaaataagtctttttgccttaagtcattttggaaataagtaatactgcatctgactctggtggctgtattagctaggaaaggtttgtaaatggtgtcagtgaggtggggaaaggaagtcttcctgtcacatatgcaggttcgttttcattctagggcagtgccaggaagtatattgatagctttgtaggtacaggaaaaacatcatcattatttcctctgttcacatttactggtcttaattaacaggtaataataatacatgtacttttagcctgaaacctcttccacgccatgggtaacttgggggagagaagaatcctccaaacgatggagtagccagtggtaatacaaagcagggagaacagaaaggtagagttactaaggccttcagtgaacagaaaggagcagagagcaagattagatctgagaagatgctctggggactgagcccactgttgttggtgtcagggaggcttactggagccacacctgcaggcgctgtgttcaggcaccaccttcctccttgagctttgcctgtctcttgccttatcagttcttcctccaccaccctacacccccctccccccggccccaagcccctgtgtctccttgttacaattaagtttctggatattgacttaagaactgttaggaagaggactagaaaaggcttcccctgcctatcctctccgatcaccaaggtggaagggagctagtaggactcttccttgacacaccttgtagtctaaatgttcggtattctattcaggacttacggtaactattatgagggaggcatggctttccaccgtcgggccaggaagagcacctgttgctgcaagctcagtgaagtggggcactcccagacctgccatgcagtttatcctctgagaatggaattggaaatgaagacctaaccagctattggtgggaatgacggaactggggattgcgatgattgatctgggaacatggctggattgtgatttaaccaagaatgctgatgttgaattctttgggcctagaatatacttgagaaagcactagtggcttgtgttcagggagaggagctggcagtttttaaccacttctgtgggagccgtgttctaacctgtggaaagtattgcaattctgtgagagtgactctgcagagtcactgcaccatcaggcttggccctgctgtgccttcagtacccagccaggttctctgggtccagggtgactctccaaagaaattggccttcagctggagaaaacattgggtggagactctcacttatgttaatgcaatcttgaaatgactgaaaggtagattgccagcacagtgagtttcccagcctgctcccccatccacacttggaaattgagggagcatgaccgctctctgacttcacatgttaatagaggatcagagcagagttgggagtatattggtcaggatcatagaaaagaagacaaagcttgctcagccatgagatggccaggtatccagttttgttaactctctttgggaatttctttttcagcctgttttttagcttagtgccattatgtcattttgatttgtattcaagtactcttcaagtatctttgtaatgaaggtttggctacttgtataggtctgcctgcagggtgaaaatgccagtgtgaatattctagctaccaaacattgttttttgttgaaaaactgactttctgttgtctacctcaggccttgtgcatttgggttatctcaagccagtcaccacagagggtctctagggtctgcaaaatagaggccaaatccagggaccaggccctaataatagaagttgtaccaaaatgcctgtggtacttgatggcctgttggtcaaataggaagtacaagtgtgtgatgttagaacctccctagttgctgctatatcaaacactgcacacttgacaagtgttttcattccccgccctctgacagaacaacattcctaattctttgaaggcaaccagtgcaaaggctactacacttgtgtaatgatatttagcagatgcatacaggactggatcccagggcactgtcagttcttccctccctctcgtgctgctcagtttgtcctctgctcccatgtaggcctaaagtcaccccactccttagtgcctgcacctcaccacgatattgaggaagcacaggacatccaagggtactctccagtttggctgtggagacttgagcaagccctaaagtcccctgctccctggacttctcctgggttgtgcttttttgggggcaacataccttggacaaagctgagctgacagctaatgtttattagcctcctacctaagtcagtcactttgctaaattcttcacctgtggtaactcattttgattgttataacatctcagcaccattattcccattttaatgatgaggaaactgagtcatagaggatacagacttgcccaaaggagagccaggattttcacaccccctcctcaagctgggcctgccctccaagtgcttgttatatacctccacgggtgtcagcccagatgactcctcacccatccaccacctgcagcttgagatgttaactattagagctccattcttttggttcaaaacgttgatacttacttagatgttccctgagaggagtgtttatttctgagtaaggggctttgttgaaagagggggttagagagagcaagacagcacttgagtgcactggcaggaagcagagataagacttgaatttcagtttggtagaccaccttctttagcagcccaacctgtagcaaatctagtttagcctgcatggcagggagagggattctcttcccaccctcaccatttgcaagtggcaggagctgagaatgccagtacgagagtgtagccaaagtgagaggctgagagcaaaggagacatttttttcagttttgagtcgagtatccagacagaggcaaatcattttgtttaactttttattaaagtgtaactatagaaacacatcaatgatttttcacaagtggagcacgtgcatacaatcggcaccccagaagccccccgtcagattcccttccagttaactacctctccaagggaaaccactatcctgagttctaagcgcatagattagttctgtctggtttggggagatatataaatggaattatgcattcttcgtatctggtttcttttcaccaatattatgtttgtgagatttttgttgcatgtatttgtacatggattttcattctcatggttgtataatatttcattgtgtgaataaaccacatactgtttatctg

SEQ ID NO: 2478 - protein, 476 aa, Homo sapiens
  ref <308>: DATABASE ACCESSION NUMBER: Refseq / NP_003790
  ref <309>: DATABASE ENTRY DATE: 2000-11-01
MANSAKAEEYEKMSLEQAKASVNSETESSFNINENTTASGTGLSEKTSVCRQVDIARKRKEFEDDLVKESSSCGKDTPSKKRKLDPEIVPEEKDCGDAEGNSKKRKRETEDVPKDKSSTGDGTQNKRKIALEDVPEKQKNLEEGHSSTVAAHYNELQEVGLEKRSQSRIFYLRNFNNWMKSVLIGEFLEKVRQKKKRDITVLDLGCGKGGDLLKWKKGRINKLVCTDIADVSVKQCQQRYEDMKNRRDSEYIFSAEFITADSSKELLIDKFRDPQMCFDICSCQFVCHYSFESYEQADMMLRNACERLSPGGYFIGTTPNSFELIRRLEASETESFGNEIYTVKFQKKGDYPLFGCKYDFNLEGVVDVPEFLVYFPLLNEMAKKYNMKLVYKKTFLEFYEEKIKNNENKMLLKRMQALEPYPANESSKLVSEKVDDYEHAAKYMKNSQVRLPLGTLSKSEWEATSIYLVFAFEKQQ

SEQ ID NO: 2479 - DNA, 1653 bp, Rattus norvegicus
  ref <308>: DATABASE ACCESSION NUMBER: EMBL / L08491
  ref <309>: DATABASE ENTRY DATE: 2002-02-08
gtggacccagccaggttggtgctggctaacatccaagaagatgaggctaaaaataatatcaccatctttacaagaattctagacagacttctggatggttacgataatcgtcttagaccaggactgggagacagcattactgaagtcttcaccaacatctatgtgaccagttttggccctgtctcagatacagatatggaatatacaatagatgttttctttcgacaaaaatggaaagacgagcggttaaaatttaaaggtcccatgaatatccttcgacttaacaacttaatggctagcaaaatctggactcctgacaccttctttcacaacgggaaaaagtcagtggctcacaatatgacaatgccaaacaagctgcttcgaatccaggatgacggaacattgctgtacaccatgaggcttacagtccaagccgaatgtccaatgcacttggaggactttccaatggacgctcactcatgcccactgaaatttggaagctatgcttacacgacctcggaagtcacttatatttggacttacaatgcttctgactctgttcaggttgctcctgatggctctaggttaaatcagtatgatttgctgggccagtcaattgggaaggagacaattaaatcaagcacaggtgaatacacggtaatgacagctcatttccacttgaaaaggaaaattgggtattttgtgattcagacctatctgccttgcatcatgactgtcattctctcccaagtgtcattctggctgaacagagaatcggtgccagcgagaactgtgtttggagtaacaactgttttgacaatgaccacattaagcatcagtgctcgaaattcccttcccaaagtggcctatgccactgccatggactggtttatcgctgtttgttacgcgtttgtgttctctgccttaattgaatttgcaactgttaattacttcacgaaaagaggatgggcttgggatggaaagagtgtagtaaatgacaagaaaaaagagaaaggctccgtcatgatacagaacaacgcctatgctgtagccgttgccaactacgccccgaatctttctaaagatcctgtcctctctaccatttccaaaagtgcaactactccagaaccaaacaagaagccagagaacaagccagccgaagccaagaaaactttcaacagtgtcagcaaaatcgacagaatgtctagaatagtgttcccggttctgtttggtacttttaatttagtttactgggctacgtatttaaaccgggagcctgtattaggggttagtccttgagtctagacattgttacttgggctgtattgcagtgttatatttagttttgttttgttttgtttgtttcattttgcttgtacagtctgactaataactgctaatttatgacccaatatgtatagtatgtatataatggtagagcttaccagtagacctctaaaggagacctgcacttgctagctcatggaaatacaggcagaaaacatcccgtgccagaagagccattgccttttcaacacatttacctaggacctagttcaaagtggatttcagatcccataatttatttattaatgttctaattagaatgaaagttgagatcctatgtcacacttcgggaaacctttgatttag

SEQ ID NO: 2480 - DNA, 752 bp, Rattus norvegicus
  ref <308>: DATABASE ACCESSION NUMBER: EMBL / L19306
  ref <309>: DATABASE ENTRY DATE: 2000-03-04
gctgcagaattttgctattgaaaatacaccggtttgcttttctcgaaattcttctctgagctcccttagtgacgttgaccaagaaaacaacaataacgaagaaactggaccagtcagagacgctgagcctgccaacgcgcaaggacagccaggcaagcctcaggcatctgggtatgcgcccaagtccttcatgtggaagacacccctgttcacatcccgggagttcggaacagctcctcaagtacaagccctgtctctaaaaaaggcccacccctcaagactccagcctctaaaagccccagtgaaggtcctgtagctaccacttctcctcgtggaactaagccagcagtgaagtcagagctgagccctattaccaggcaaacttcccacattagtgggtcaaataaggggccctctaggtcagggtctagagactccactcctcgagacccacacagcagccattaagtaggccgatgcagtcgccagggcggaactcgatctcccccggtagaaatggaataagcactcctaacaaactctctcagctgcccagaacatcgtctcccagtactgcttcgaccaagtcctcggggtcggggaaaatgtcctacacatccccaggccggcagctgagccagcaaaacctcagcaaacaaacaggcttgtccaagaacgccagcagcatccccagaagtgagtcagcatccaaaggactgaatcagatgaataacagcaatgggtctaataaa

SEQ ID NO: 2481 - DNA, 841 bp, Rattus norvegicus
  ref <308>: DATABASE ACCESSION NUMBER: Refseq / NM_031619
  ref <309>: DATABASE ENTRY DATE: 2003-01-13
cagacttgacaagacccaggagggcctgtcctcatcaacccaagatgaaattccctctacttctggctcttctagtcgggggagcatttgctcttcatctaagctctgaagcttctgactccaaaagcccactggtggatgagagcttgcctcgggaagcagagatatcaagaccggaagtagaagaatcccctcctggggaacagctaatgtccctggaggaggaggaagaggaagaggaggaagaaggttctggaagtgaaggtgctcttggaaatgaaggagctgtctcaggtcaggatgtgacagatgagaaccttcagtcccccaaggaggaagacacaacgagtctgatgggtgactctggattcaagaccggtcgctacctcctagtcaggaggcctgagtgctttaacaaagctcagttggtctgccggagctgctaccggggcacccttgcctccatccacagtttcagtgttaacttccgaatccagtcctttgtcaggggaatcaaccagggtcaagtctggattggaggcaggattgtgggctggggtcgctgcaaacgcttccgatggattgatggaagctcttggaattttgcatactgggctgctgggcagcctcgtcgcggcggtggcagatgtgtgaccctgtgtacccgaggaggccactggcgccgatctggctgtggcaagagacgccccttcatctgtgcatattaagctggtcccagctgggagttcaaattcatcctctcctgggtagctgcctcttctttcctgcgagatgtccctcgtctttcaccaccctaaaataaagccgctttacttaacag

SEQ ID NO: 2482 - protein, 227 aa, Rattus norvegicus
  ref <308>: DATABASE ACCESSION NUMBER: Refseq / NP_113807
  ref <309>: DATABASE ENTRY DATE: 2003-01-13
MKFPLLLALLVGGAFALHLSSEASDSKSPLVDESLPREAEISRPEVEESPPGEQLMSLEEEEEEEEEEGSGSEGALGNEGAVSGQDVTDENLQSPKEEDTTSLMGDSGFKTGRYLLVRRPECFNKAQLVCRSCYRGTLASIHSFSVNFRIQSFVRGINQGQVWIGGRIVGWGRCKRFRWIDGSSWNFAYWAAGQPRRGGGRCVTLCTRGGHWRRSGCGKRRPFICAY

SEQ ID NO: 2483 - DNA, 1637 bp, Homo sapiens
  ref <308>: DATABASE ACCESSION NUMBER: Refseq / NM_002728
  ref <309>: DATABASE ENTRY DATE: 2002-11-05
aatattctgcttttcctgttatgtgtttcagatttttctacaccaccgccacactcatcatagccttcacctctgcaggctcagccgtgctgctcttcctggccatgccaatgctcaccattgggggaatcctgtttctcatcaccaacctgcagattgggaacctatttggccaacaccgttcgaccatcatcactctgtacaatggagcatttgactcttcctcggcagtcttccttattattaagcttctttatgaaaaaggcatcagcctcagggcctccttcatcttcatctctgtctgcagtacctggcatgtagcacgcactttcctcctgatgccccgggggcacatcccatacccactgccccccaactacagcataggcctgtgccctgggaatggcaccacaaaggaagagaaggaaacagctgagcatgaaaacagggagctacagtcaaaggagttcctttcagcgaaggaagagacccaggggcagggcagaagcaggaactccgctccttctggagctacgctttctctcggcgctttgcctggcacctggtgtggctgtctgtgatacagttgtggcactacctcttcattggcactctcaactccttgctgccaacatggccggtgggacatggcacgagtcagcacctacacaaatgcctttgccttcactcagttcggagtgctgtgtgccccctggaatggcctgctcatggaccggcttaaacagaagtaccagaaggaagcaagaaagacagggtcttttaacatccgaggaccacattctttatactttccaaatcatcacctgccccatgcaacttacagggataaagccaagatgaaactccccttacttctggctcttctatttggggcagtttctgctcttcatctaaggtctgagacttccacctttgagacccctttgggtgctaagacgctgcctgaggatgaggagacaccagagcaggagatggaggagaccccttgcagggagctggaggaagaggaggagtggggctctggaagtgaagatgcctccaagaaagatggggctgttgagtctatctcagtgccagatatggtggacaaaaaccttacgtgtcctgaggaagaggacacggtaaaagtggtgggcatccctgggtgccagacctgccgctacctcctggtgagaagtcttcagacgtttagtcaagcttggtttacttgccggaggtgctacaggggcaacctggtttccatccacaacttcaatattaattatcgaatccagtgttctgtcagcgcgctcaaccagggtcaagtctggattggaggcaggatcacaggctcgggtcgctgcagacgctttcagtgggttgacggcagccgctggaactttgcgtactgggctgctcaccagccctggacccgcggtggtcactgcgtggccctgtgtacccgaggaggctactggcgtcgagcccactgcctcagaagacttcctttcatctgttcctactgagctggtcccagccagcagttcagagctgccctctcctgggcagctgcctcccctcctctgcttgccatccctccctccacctccctgcaataaaatgggttttactgaaaa

SEQ ID NO: 2484 - protein, 222 aa, Homo sapiens
  ref <308>: DATABASE ACCESSION NUMBER: Refseq / NP_002719
  ref <309>: DATABASE ENTRY DATE: 2002-11-05
MKLPLLLALLFGAVSALHLRSETSTFETPLGAKTLPEDEETPEQEMEETPCRELEEEEEWGSGSEDASKKDGAVESISVPDMVDKNLTCPEEEDTVKVVGIPGCQTCRYLLVRSLQTFSQAWFTCRRCYRGNLVSIHNFNINYRIQCSVSALNQGQVWIGGRITGSGRCRRFQWVDGSRWNFAYWAAHQPWTRGGHCVALCTRGGYWRRAHCLRRLPFICSY

SEQ ID NO: 2485 - DNA, 1161 bp, Rattus norvegicus
  ref <308>: DATABASE ACCESSION NUMBER: EMBL / M12822
  ref <309>: DATABASE ENTRY DATE: 1999-09-02
ggccacaccaaaggaagccatagagaggctgatatcagagtattcttggaagaggcaggagaaaatgaaagccaatctctgcttctaccttacatgtttgtgttaagggtgtcagataaactggtctggtatctctgtctgatgcatggaactattgtagctgaagaagaacatagtttcagggaagaaaggcaatagaaggaaggctctgaatagcttcaaagggtcagacccaatttactttctaaagtagctagggactagggaataactcaaaacccacaagactgtatacatgtgtcctggcttcattgttcctaatctgtagggataagtgtgcttttctgtgtgtctgtctataacatgcataatgcactgaaagggagattttccttgttacttcacaccatctctgcgcttccttcctcaggggctgatgctgcaccaactgtatccatcttcccaccatcctcggatcagttagcaactggaggtgcctcagtcgtgtgcatcatgaacaacttctatcccagagacatcagtgtcaagtggaagattgatggcagtgaacgacgagatggtgtcctggacagtgttactgatcaggacagcaaagacagcacgtacagcatgagcagcaccctcacgttgaccaaggctgactatgaaagtcataacctctatacctgtgaggttgttcataagacatcagcctcccccgtcgttaagagcttcaacaggaatgagtgttagacccaaaggacctgaggtgccacctgctccccagatccttccaatcttccctcctaaggtcttggagacttccccacaagcgacctaccactgttgcggtgctccaaacctcctccccacctcatcctccttcctttccttggctttgatcatgctaatatttggggaatattaaataaagtgaatctttgcacttgagatctttgtctttcttactaaatagtggttaacaattatttatcttgttacctggtttctcttctaaagaagttaaatgtttagttgccctgaaatccaccacacttaaacaacaaataaaactctcccccttgccctacttggttgtccactacatggcagtcctctctaaggttcacaagtactattcatggcttatttctctgggcc

SEQ ID NO: 2486 - DNA, 1358 bp, Rattus norvegicus
  ref <308>: DATABASE ACCESSION NUMBER: Refseq / NM_022393
  ref <309>: DATABASE ENTRY DATE: 2003-01-13
ccacctctggccactgctgcacagggaagccacgatttcacacagttccaggacttacctcagcttcacactgcttctgacactctccttggtcccagctcagtatctgtctggattctggtgtctcggtttcagttcagatagccctagaggccttgtgtttgtgcaagcatgacaatggcatatgaaaacttccagaacttggggagcgaagagaaaaaccaagaggctggtaaagctcctccccagtccttcctgtgcaatatcctctcttggacccacctcctcctgttctccctgggccttagcctcctgctgctggtggttatctccgtgattggatcccaaaattcccagttaaggagggacctagaaaccctgagaaccactttagacaacaccacctccaacaccaaggctgaactacaggccctggcctccaggggtgacagcttgcaaacaggaatcaattctctgaaagtggaggtggatgatcatgggcaggaactgcaggcaggccgaggcttgagccagaaggtggcttctctggagagcacagtggagaagaaggagcagactctcagaacagatctatctgaaataaccgatcgtgtgcaacagctggggaaggacttgaagaccctgacatgtcagctggccagcctcaagaacaacggctcagcagtggcctgctgcccccttcactggatggagcatgaaggcagctgctactggttctctcagtctgggaagccgtggcctgaagctgacaagtactgccagctggagaattctaacctagtggtggtcaactccctggcggagcagaattttctacagactcacatgggcagtgtggtcacttggattggcctaacggaccaaaatgggccctggcgatgggtggacgggaccgactatgagaaaggctttacgcactgggccccaaagcagccagataactggtatggacacgggctgggaggaggcgaggactgtgcacacttcacctcagatggtcgctggaatgatgacgtttgccagaggccctaccgctgggtctgtgagatgaagctggccaaggacagctaggagcactctccaagtaatttatttcttcagtggttttagctggggaagcctggagtttggactcctcctatcccatttcaatgttatttgggacttttctttttgtcaaaaaatttaagtcaaggagaaaggattgtgtttgagatggtagtgtggtgtccggaagaatggggttattgaaatctgtggtattttgtacagagtgccgcttattgtaggactttttaatgtaacaaaaataaaatactgttggttttaaaaaaaac

SEQ ID NO: 2487 - protein, 306 aa, Rattus norvegicus
  ref <308>: DATABASE ACCESSION NUMBER: Refseq / NP_071788
  ref <309>: DATABASE ENTRY DATE: 2003-01-13
MTMAYENFQNLGSEEKNQEAGKAPPQSFLCNILSWTHLLLFSLGLSLLLLVVISVIGSQNSQLRRDLETLRTTLDNTTSNTKAELQALASRGDSLQTGINSLKVEVDDHGQELQAGRGLSQKVASLESTVEKKEQTLRTDLSEITDRVQQLGKDLKTLTCQLASLKNNGSAVACCPLHWMEHEGSCYWFSQSGKPWPEADKYCQLENSNLVVVNSLAEQNFLQTHMGSVVTWIGLTDQNGPWRWVDGTDYEKGFTHWAPKQPDNWYGHGLGGGEDCAHFTSDGRWNDDVCQRPYRWVCEMKLAKDS

SEQ ID NO: 2488 - DNA, 1202 bp, Homo sapiens
  ref <308>: DATABASE ACCESSION NUMBER: Refseq / NM_080914
  ref <309>: DATABASE ENTRY DATE: 2002-01-29
ccccagccctcagagcaacctcagcccagcccagcccagctccagctccagctccagcccgggccccatcatggccaaggactttcaagatatccagcagctgagctcggaggaaaatgaccatcctttccatcaagggccacctcctgcccagcccctggcacagcgtctctgctccatggtctgcttcagtctgcttgccctgagcttcaacatcctgctgctggtggtcatctgtgtgactgggtcccaaagtgagggtcacagaggtgcacagctgcaagccgagctgcggagcctgaaggaagctttcagcaacttctcctcgagcaccctgacggaggtccaggcaatcagcacccacggaggcagcgtgggtgacaagatcacatccctaggagccaagctggagaaacagcagcaggacctgaaagcagatcacgatgccctgctcttccatctgaagcacttccccgtggacctgcgcttcgtggcctgccagatggagctcctccacagcaacggctcccaaaggacctgctgccccgtcaactgggtggagcaccaaggcagctgctactggttctctcactccgggaaggcctgggctgaggcggagaagtactgccagctggagaacgcacacctggtggtcatcaactcctgggaggagcagaaattcattgtacaacacacgaaccccttcaatacctggataggtctcacggacagtgatggctcttggaaatgggtggatggcacagactataggcacaactacaagaactgggctgtcactcagccagataattggcacgggcacgagctgggtggaagtgaagactgtgttgaagtccagccggatggccgctggaacgatgacttctgcctgcaggtgtaccgctgggtgtgtgagaaaaggcggaatgccaccggcgaggtggcctgaccccagcacacctctggctaacccataccccacacctgcccagctctggcttctctgttgaggattttgaggaaaggaagaaacactgagacaggggtatggggaagagctgagcaaagagagaaaggaggtagtttaagagtccctgaccctggaggactgagatcccacctccttctgtaattcattgtaattattataatcgtcagcctcttcaatggcgtaggaaagaagaaacaaatgcttgaatctc

SEQ ID NO: 2489 - protein, 292 aa, Homo sapiens
  ref <308>: DATABASE ACCESSION NUMBER: Refseq / NP_550436
  ref <309>: DATABASE ENTRY DATE: 2002-01-29
MAKDFQDIQQLSSEENDHPFHQGPPPAQPLAQRLCSMVCFSLLALSFNILLLVVICVTGSQSEGHRGAQLQAELRSLKEAFSNFSSSTLTEVQAISTHGGSVGDKITSLGAKLEKQQQDLKADHDALLFHLKHFPVDLRFVACQMELLHSNGSQRTCCPVNWVEHQGSCYWFSHSGKAWAEAEKYCQLENAHLVVINSWEEQKFIVQHTNPFNTWIGLTDSDGSWKWVDGTDYRHNYKNWAVTQPDNWHGHELGGSEDCVEVQPDGRWNDDFCLQVYRWVCEKRRNATGEVA

SEQ ID NO: 2490 - DNA, 3113 bp, Rattus norvegicus; identical to SEQ ID NO: 1945
  ref <308>: DATABASE ACCESSION NUMBER: Refseq / NM_022394
  ref <309>: DATABASE ENTRY DATE: 2003-01-13

SEQ ID NO: 2491 - protein, 874 aa, Rattus norvegicus; identical to SEQ ID NO: 1946
  ref <308>: DATABASE ACCESSION NUMBER: Refseq / NP_071789
  ref <309>: DATABASE ENTRY DATE: 2003-01-13

SEQ ID NO: 2492 - DNA, 574 bp, Rattus norvegicus
  ref <308>: DATABASE ACCESSION NUMBER: EMBL / AA891559
  ref <309>: DATABASE ENTRY DATE: 2000-03-03
aaagggtatcagattgttaagggggccaatgccttgaggggtttgcgattccaagggctttttcagaatgacccaacctcaggaaacttgtgtttctcgtaagcctgtggtagtggttgtccctgacactggagtgagagagcaggggcagagctggagggctatggccaggaagcttgtgacctgctgggcagcaagggacttgttgacagcagaggcccaggtgtgtgggaggcaacactgccaccacagggccaaccctggcattagctgcttactactaagcttgtcctttagagaaaagtgaaacaggacctggttctgacagatgtggcacagaaagaaggttgtttgggttttctgagtcctctgcttaaagctgagcaatgcttcagggaggtgcagacagcgttttcccaccacctccttaggatgcctggggctgtggcagccaccctggacacgtgggatgaagagttagagattgtaagagtcagatccctgatgaagtcctgggtgaacgataaactctcctccagtccctatgatggaataaaaggtctttgtccaactg

SEQ ID NO: 2493 - DNA, 572 bp, Rattus norvegicus
  ref <308>: DATABASE ACCESSION NUMBER: EMBL / U82612
  ref <309>: DATABASE ENTRY DATE: 2000-03-04
atcaaacagaaatgaccattgaaggtttgcaacccaccgtggagtatgtggttagtgtctatgctcagaaccggaacggagaaagccagcccctggttcagactgcagtgaccaacattgaccgccctaaaggactggcattcactgatgtggatgtcgattccatcaaaattgcctgggaaagcccacaggggcaagtttccaggtacagggtgacctactcaagccctgaggatggaatccatgagcttttccctgcgcctgatggtgacgaggacacggcagagctgcacggcctcaggccgggttctgagtacacagtcagtgtggttgccttgcacggtggcatggagagccagcccctgattggagtccagtccacagccattcctgcgccaaccaatctgaagttcactcaggtgtcacccaccaccttgactgcccagtggacagcacccagtgttaagctcactggctaccgagtgcgggtgaccccgaaggagaagacaggaccaatgaaagaaatcaacctttctccagacagcacctccgtgattgtgtcagggctcatg

SEQ ID NO: 2494 - DNA, 840 bp, Rattus norvegicus
  ref <308>: DATABASE ACCESSION NUMBER: Refseq / NM_017110
  ref <309>: DATABASE ENTRY DATE: 2003-01-14
agcgaggaagtccagcaccatggagagctcccgcctgcggctgctacccgtcctgggcgccgccctactgctgctgctacctttgctgggtgccggtgcccaggaggatgccgagctgcagccccgagccctggacatctactctgccgtggatgatgcgtcccatgagaaggagctgccaaggcggcaacttcgggctcccggcgctgtgttgcagattgaagcgctgcaggaagtcctgaagaagctcaagagtaaacgcattccgatctatgagaagaagtacggccaagtccccatgtgtgacgctggagagcagtgcgcagtgcggaaaggggccaggatcgggaagctgtgtgactgtccccgaggaacttcttgcaattctttcctcttgaagtgcttgtgaaggggtgacagcctccttcggttcccatatttcctctttcccctaaaggagcgctcttttgtccctggagccgctttaacaacaataaagtttgcgttccccccagagagtggatgggctctttccctgctgcttcaaaataaaagatttgatgttattgtgtgaaggacaataccttgaatggtgttggtatgtgtgcaaagtattcttctctcgttttatccacctgacacattcttgtgacctttctgggaagaagagggactttcgctttaaaactgtatttttgtatgtggcgggtcacaatgaagattagacctagttaattttggcagatgacatcataacccggaaaacaaatcaccccaaagcaacacaaatggaagcatgtgcaaattacacccaataaagcatttttgataattgctcac

SEQ ID NO: 2495 - protein, 129 aa, Rattus norvegicus
  ref <308>: DATABASE ACCESSION NUMBER: Refseq / NP_058806
  ref <309>: DATABASE ENTRY DATE: 2003-01-14
MESSRLRLLPVLGAALLLLLPLLGAGAQEDAELQPRALDIYSAVDDASHEKELPRRQLRAPGAVLQIEALQEVLKKLKSKRIPIYEKKYGQVPMCDAGEQCAVRKGARIGKLCDCPRGTSCNSFLLKCL

SEQ ID NO: 2496 - DNA, 482 bp, Rattus norvegicus
  ref <308>: DATABASE ACCESSION NUMBER: EMBL / AA800795
  ref <309>: DATABASE ENTRY DATE: 2000-03-03
actagccagagatcttcaagaacaagaagactctctttttagctcagtgccctgtgacccagtgtggggcatgggagaaatgagggcaacggcagagactctggtcagttgtgtgggtgggtggtaacctgggagccccctcagagcctgtgggactgggggctgaaagtgctatctgcctttgtggccactggttccctggcctagctgcctgtaggactgcggtaggagagggtaaaagacacagggtggaatggccagcagttgagagcaagggagatgtgaactagaaaacccaccctaaaaatttccggttttaattccagggctgcacaaagtgttaagagagtgagtgtaaaatgaaactagggtgttgttacccttaaaggcaccttgaatggttctaacccataccctatgtagaaaaagtcttgagcccttaacaggtagacatgggtctgagacctaaggttgcaggaagt

SEQ ID NO: 2497 - DNA, 2188 bp, Rattus norvegicus
  ref <308>: DATABASE ACCESSION NUMBER: EMBL / AB001576
  ref <309>: DATABASE ENTRY DATE: 1998-12-29
ttttttttttttaagacagcctttgccccggtcgaccctaacggcaaaaacatcaagaaagaggtgggcaagatcctgtgcactgactgcgcaacccggcccaagctgaagaagatgaagagtcagacaggagaggtgggcgagaagcagtcgctcaagtgtgaggcggcggcggggaacccccagccctcctatcgatggttcaaggacggcaaggagctcaaccggagtcgtgacattcgcatcaagtatggcaacggcagaaagaactcacggctacagttcaacaaagtgaaggtggaggacgctggagagtacgtctgtgaggctgagaacatccttgggaaggacactgtgaggggccggctccatgtcaacagtgtgagcaccactctgtcgtcctggtcggggcacgcccggaagtgcaatgagacagccaagtcctactgtgtgaatggaggcgtgtgctactacatcgaaggcatcaaccaactctcctgcaaatgtccaaacggattcttcggacagagatgtttggagaaactgcctttgcgattgtacatgccagatcctaagcaaaaggctgaggagctgtaccagaagagagtcctgacaattaccggcatctgtgtggctctgctggtcgtgggcatcgtctgtgtggtcgcctactgcaagactaaaaaacagaggaggcaaatgcatcaccatctccggcagaacatgtgtccggcccaccagaaccgaagcctggccaatgggcccagccaccctcggctggaccctgaggagatccagatggcagattacatttccaaaaatgtgccagctacagaccatgtgatccggagggaagctgagaccacattttctgggagccactcctgttcaccctctcaccactgttccacagccacacccacctccagccacagacatgagagccacacgtggagcttggaacgttcggagagcctgacctcggattcccagtcaggcatcatgctatcatcagtgggcaccagcaagtgcaacagcccagcatgtgtggaggcacgggcacggagggcagcagcctacagccaggaggagcgacgcagggctgccatgccaccctaccacgactccatagactcgctgcgtgactccccacacagtgagaggtacgtgtcagccctgaccacgcccgcgcgcctttcgcccgtggacttccactactcgctggccacccaggtgccgactttcgagatcacgtcgcccaactctgcccacgccgtgtcgctgccacccgcagcgcccatcagctaccgcctagcggagcagcagccgctcctgcggcacccagcgccgcccggcccggggccagggcccggagcggacatgcagcgcagctacgacagctactactacccggcggcggggcccgggccgcggcgcggcgcctgcgcgctgggaggcagtttgggcagcctgcccgccagccccttccgcatcccggaggacgacgagtacgagaccacgcaggagtgcgcgcccccgccaccgccgcggccgcgcacgcgcggcgcgtcccgcaggacgtcggcggggccgcggcgctggcggcgctcccgcctcaacgggttggctgcgcagcgcgcacgcgcagcgcgggactcgctgtcgttgagcagcggttcgggctgcggctcggcgtcggcctcggacgacgatgcggacgacgcggacggggcgctggcggccgagagcacgcctttcctcggcctgcgagcggcgcacgacgcgctgcgctcggactcgccgccgctctgcccggcggcggacagcaggacttactactccctggacagccacagcacgcgcgccagcagcagacacagccgggggccgcccacgagggcaaagcaggactccgggcccctctaaggcctcccgcctcgcccgcctcacgtctccgaggagagcggagaccaccgactggagagggaaaaaggagcgaacaaagaaataaaaatatttttattttctataaaaggaaaaaagtataacaaaatgttttattttcattttagcaaaaaaaattgtcttataatactagctaacggcaaagacgtttttatagggaaactatttatatgtaacatcctgatttacagcttcggaaaaaaaaaagaaacaacaaaaaaaa

SEQ ID NO: 2498 - DNA, 1226 bp, Rattus norvegicus
  ref <308>: DATABASE ACCESSION NUMBER: Refseq / NM_017200
  ref <309>: DATABASE ENTRY DATE: 2003-01-14
ggacctgtctccggatttcttctgaagaccgtataattttgggatctcatctccagatctcttttgaggacgactgactcatcaagaaatgactaacaaactgaagaaagaccacgccttctgggcggctgtgtgtctgctgcttagcattgttcctgagcttcttaatgctctgcccgaggaagacgatgatacaataaacacagattccgagctgcggccaatgaaaccgttgcatacattctgtgcaatgaaggcggaagacgggccctgcaaagcaatgatacggagttattatttcaatatgaacagtcaccagtgtgaagaatttatatacgggggatgcagaggaaacaagaaccgatttgatactctggaagagtgtaggaaaacatgcataccaggttataaaaagacaactataaagacaacatctggagcagaaaagccagatttctgcttcttggaagaggatcctggaatctgccgaggtttcatgaccaggtatttttataacaaccagtcaaagcagtgtgaacaattcaagtacggcggttgcctgggcaacagcaacaactttgagaccttggaggagtgcaggaacacctgtgaggatccagtgaatgaggtacagaagggtgactacgtaactaatcaaattactgtaactgatcgcactactgtaaataacgtggtgattcctcaggctaccaaagcgcccagccaatgggactatgatggcccttcatggtgtcttgaaccagcagacagtggattatgtaaagccagtgagaaaagattctactacaacccagccattgggaaatgccgtcaatttaactacactggatgtgggggaaataataataattttactaccaaacaagattgtaatagagcatgtaaaaaagattcctccaaaaaaagctcaaaaagagcaaagacccaaagaagaaggaagtctttcgtgaaagtcatgtacgaaaatattcattagtgctaagatataagcacatgacatttttacattagtttcactaaatattcctataaggtgttttcactatgatttctactcttctacaaaccagtttcttgtttccattggtgaccatctactggaagatatattttcatcggttatgatcacaaacattacatacccttgacagtctaaatcttctctaatgattttatttttaacaataaaatcttttatcctgagc

SEQ ID NO: 2499 - protein, 302 aa, Rattus norvegicus
  ref <308>: DATABASE ACCESSION NUMBER: Refseq / NP_058896
  ref <309>: DATABASE ENTRY DATE: 2003-01-14
MTNKLKKDHAFWAAVCLLLSIVPELLNALPEEDDDTINTDSELRPMKPLHTFCAMKAEDGPCKAMIRSYYFNMNSHQCEEFIYGGCRGNKNRFDTLEECRKTCIPGYKKTTIKTTSGAEKPDFCFLEEDPGICRGFMTRYFYNNQSKQCEQFKYGGCLGNSNNFETLEECRNTCEDPVNEVQKGDYVTNQITVTDRTTVNNVVIPQATKAPSQWDYDGPSWCLEPADSGLCKASEKRFYYNPAIGKCRQFNYTGCGGNNNNFTTKQDCNRACKKDSSKKSSKRAKTQRRRKSFVKVMYENIH

SEQ ID NO: 2500 - DNA, 3508 bp, Rattus norvegicus
  ref <308>: DATABASE ACCESSION NUMBER: Refseq / NM_012887
  ref <309>: DATABASE ENTRY DATE: 2003-01-14
ggcacgaggctcgctgcgggctccaggcttggccgcacttgctcaccagtggtgcgcccggggcttttgtggcttagccggcctgggctttgtgtccgagttctgctccgtgcctgcggcgcttctcccggtcagggattcccgaggcggcgtgcgcagcccccgggaccagcgagcgatcgagcgagcgcgccggcttgagcggtggcgactgcgaggggccgaggaggagagaaggagggggacgagatgccggagttcctagaggacccttcggtcctgaccaaagacaagttgaagagcgagttggtcgccaacaacgtgacgctcccggccggcgagcagcgcaaggacgtgtacgtgcagctctacctgcagcacctcacggcgcgcaaccggccgccgctcgccgcgggagccaacagcaaagggccgcccgacttctcgagcgacgaggagcgcgagcccaccccagtgcttggctccggggcctccgtgggtcgcggccgcggcgccgtcggcaggaaagccacaaagaaaactgataagcccaggccagaagataaagatgatctggatgtgacagagctctctaacgaagaacttctggaacagcttgtgagatatggagtgaatcctggtcccattgtgggaaccaccaggaagctgtatgagaagaagctgttgaagctgagggaacagggagcagaatcgagatcctctactcctctcccaacagtctcttcctctgcagaaaacacgaggcagaatggaagtaatgactctgacagatacagtgacaatgacgaagactctaaaatagagctcaagcttgagaagagagagccgctaaagggcagagcaaagactccagtaacactcaagcaaaggaggattgagcacaatcagagctattctgaagctggagtaactgagactgaatggacaagtggatcttcaaaaggcggacctctgcaggcattaactagggagtccacgagagggtcgagaagaactccaaggagaagggtggaaccctcacagcattttcgtgtagatggtgcagtaatttcagagagtactcccatagctgagactataaaggcttccagcaacgactccttagtggccaataggttgactggaaatttcaagcatgcatcttctattctgccaatcactgaattctcagacataaccagaagaacaccaaagaaaccattgacaagagctgaagtgggagaaaaaacagaggaaagaagagtagaaagggatattctgaaggaaatgttcccgtatgaagcctctactccaaccggaattagtgctagttgccgcagaccaatcaaaggtgctgccggccggccgctcgagctcagtgacttcaggatggaagaatcgttctcatctaagtacgtcccgaagtacgttcccttggcagacgtcaagtcggaaaagacaaagaagggacgctccgttcccatgtggataaaaatgctgctgtttgctctcgtggcgggttttttgtttttggtctatcaagctatggaaaccaaccaaggaaaccccttcactaattttcttcaagatactaaaatatccaactgaagaaatcatttcggcacatccgactcgatctcctgtttttaataactgtagaaaagcatctgtgtccacttgttggccgaagaactaaattgtgatttcacctcagtaaaggtagcgctgcgttggaaagcagacaggaagcttacctggatctcatttcaatgttttggactttggagatcacactgtgccatatgaataatttttttagctccagaacttttttgtaggctttatttttttaatgtggacatcttatttcacttttggggaaaatgcattgttttgtgtatttgaaaaataaggcaaaacatggtgatgtaatgtgaagctacacattaaatacttggaattcttacagaaaagatttatgacttattctctgctgagtaaaaatgttagaaatgtgaatggcgttcagtaagagaagcggtcacgagttgtgcttccttccatatgcagcggtttgtccgtggaaggtccagcaataagctcttctgggactcctgtcgtgcgtgtggtgtcgctggcgcacctgccacactgctcactagaatattttcatatcatgaaagtgctacgtcattaaagccctgagtacacttagttttccactgggatcttggagagcaacatagatacctgcttagggagcctttagctggctgcgcgcgtctaagagaccgagggctagctagaagctcccgttgggatcctgtgcttgtatttacggcaaagcatctatcccgtccatccagctcatcagactgttctgtaggtaaataagcatgggggtgtttgtttagagttagaaactaaacaccagtcccctccacttcagtccgattccattgtcgtcttttaaccaaaaaaaagttttcctggccagggatttttgttttgctttgttttagatggagttggggtgttgagatttttgtttgttttaggcatgtaattcctgatgtaatttgatttaaaagtataactgacttgcttttaaatcacatatatagtagctaatgcttaatttgtaatttcaaataaggtgggcattatggttctgtgtattcctgaagtgattaacgatatccttatggttgtcttttttagctgaaatttacctcatgtatggcttagatgatgttgcagtcgatttaaattttggtaaaaatcaagtacagcataaacatttttaactaaatcatttaagttgcaattttacagtcattgaccacaaagcacactaaaaatgtaaattatttttaataacatccggaatgtaaagacagttttaatttttacaaaggaggaagctgaatatgaatatctagaccagcacacaactttgacttaatgtttactgtgtttagcttatagatatgtcgtaggcatttgaagtaaacttctgccccagagaccagaacatggaccagaacatgtaggcctggtccgtgaggcgtgtggggagctgacttagatctgaagtgctttcctctcaaagacaagccacaaggggcatgttttactcaactttccctctctacagtgacagccatctttctttgttctcagacacagcttctcatattgctttcagtcatctgtttataattaaaaattgtgagaagccccatttgatgtttaaaaacaggggtgggggttaatctggcttcacatttctataaggtcgctctggatagggaagtgtggtccagtacagtgaaagtcggaccaggtaaaacatgccattttctttttaaaagcgtgtacttggtcttttgtctgtgtctgttttattccactagagtaaatgtgtccttgatgtaaatgcaaagcatttattaattcgtagatgtagactttacaatataattcaataataaagtaattaacctct

SEQ ID NO: 2501 - protein, 452 aa, Rattus norvegicus
  ref <308>: DATABASE ACCESSION NUMBER: Refseq / NP_037019
  ref <309>: DATABASE ENTRY DATE: 2003-01-14
MPEFLEDPSVLTKDKLKSELVANNVTLPAGEQRKDVYVQLYLQHLTARNRPPLAAGANSKGPPDFSSDEEREPTPVLGSGASVGRGRGAVGRKATKKTDKPRPEDKDDLDVTELSNEELLEQLVRYGVNPGPIVGTTRKLYEKKLLKLREQGAESRSSTPLPTVSSSAENTRQNGSNDSDRYSDNDEDSKIELKLEKREPLKGRAKTPVTLKQRRIEHNQSYSEAGVTETEWTSGSSKGGPLQALTRESTRGSRRTPRRRVEPSQHFRVDGAVISESTPIAETIKASSNDSLVANRLTGNFKHASSILPITEFSDITRRTPKKPLTRAEVGEKTEERRVERDILKEMFPYEASTPTGISASCRRPIKGAAGRPLELSDFRMEESFSSKYVPKYVPLADVKSEKTKKGRSVPMWIKMLLFALVAGFLFLVYQAMETNQGNPFTNFLQDTKISN

SEQ ID NO: 2502 - DNA, 2069 bp, Rattus norvegicus
  ref <308>: DATABASE ACCESSION NUMBER: Refseq / NM_139040
  ref <309>: DATABASE ENTRY DATE: 2003-01-13
gaattcggcacgagcggggctgctgcccgggaggtgaagggaggttaagtgtgttgttgtgttagtgctgccgtcgccgcccgggacggagctgagagccggacgtccgcaggctgacgagagcggccagtcagcagctgcgtgctctcctcaggccgggtcctgtctgcgctgccgcagggaggccgcccggcccagcgaaccgaaccaatgctggacctggaggtggtgcctgaacgctctctggggaacgagcaatgggaattcacactgggaatgcctctggctcaggcagtagccattcttcagaagcactgtcgcatcatcaaaaatgtccaggttctctacagtgagcagtctcctctaagccatgacctcatccttaacctgactcaagacgggatcaagctactgtttgatgctttcaatcagagacttaaggtgattgaagtttatgacttaacaaaagtaaagttaaagtattgtggagtgcattttaactctcaggccatcgctcctaccattgagcaaattgaccagtcttttggtgcaacccatccaggagtgtacaactctgctgagcagctcttccacctcaacttcagaggactgtctttctcttttcagttagactcatggacggaggctcccaagtatgagcccaattttgcccatggtctagcttctcttcagataccccatggagcaactgtaaaacgaatgtacatttatagtggaaacagcctccaggataccaaggctcctatgatgcccctgagctgtttcctggggaatgtatatgctgaaagtgtagacgttattcgagacggaactggaccctcagggttgcgacttcgcttgctcgctgcaggttgtggacccggagtattggcagatgccaaaatgagagtatttgagcgtgcggtgtattttggtgattcttgccaagatgttcttagcatgcttggctctccacacaaagtcttctataaatctgaagacaagatgaaaattcactctccttcccctcataaacaagttccatccaagtgcaatgactacttttttaactatttcactcttggagtggacatcctgtttgatgcaaatacacacaaagtgaagaagtttgtcctgcataccaattaccctgggcattataattttaacatttaccaccgctgtgagttcaagatcccactagccataaagaaagaaaatgcaggtggtcaaaccgaaatatgcacaacctacagcaagtgggacagcatccaggagcttctgggccatcctgtggaaaagccggttgtcttgcacagatcctcatccccaaataacaccaacccatttggctctacattctgctttggtcttcagcggatgatctttgaggtcatgcagaacaaccacattgcctcagtgaccctgtatggcccccctaggcctggtgcccacctgagaacagcagagctgccctaaggacttcactgttttccctctgtccatggaactgtgcatcacatccagctcagtgggtctctgtgccaccaccctgtgtgttttcttgggcaccttggcagtgttgaagggctgtgggactttgggtttggaaggctgagttttctgccttgggacagaggacccagctgtccaaagcctgctgtcgccatgagagaacacagtctgcaaagagaagcacaaactttgagcctggatgagggctctcttattaacatgtaataaaggacacgccagccctgtcctgcacatgaggaagacggggctctttctctatctaaggacctgtacctaggagagaacagggtcctgcttttggcccgacattgccatgtgctcaccttaaggtgagcagagcagatgtatagcatgtcagtagtacttggttgcaatatttgcactacatccactttagttacttgatgagctggctgtggctggtgtggcccactgccctttcctgtttcttctgtgtgagtgctccttgccatgcccaggtggcatacccaagtggttgaaatacagttttctcccaagtatgttccaggcct

SEQ ID NO: 2503 - protein, 422 aa, Rattus norvegicus
  ref <308>: DATABASE ACCESSION NUMBER: Refseq / NP_620609
  ref <309>: DATABASE ENTRY DATE: 2003-01-13
MLDLEVVPERSLGNEQWEFTLGMPLAQAVAILQKHCRIIKNVQVLYSEQSPLSHDLILNLTQDGIKLLFDAFNQRLKVIEVYDLTKVKLKYCGVHFNSQAIAPTIEQIDQSFGATHPGVYNSAEQLFHLNFRGLSFSFQLDSWTEAPKYEPNFAHGLASLQIPHGATVKRMYIYSGNSLQDTKAPMMPLSCFLGNVYAESVDVIRDGTGPSGLRLRLLAAGCGPGVLADAKMRVFERAVYFGDSCQDVLSMLGSPHKVFYKSEDKMKIHSPSPHKQVPSKCNDYFFNYFTLGVDILFDANTHKVKKFVLHTNYPGHYNFNIYHRCEFKIPLAIKKENAGGQTEICTTYSKWDSIQELLGHPVEKPVVLHRSSSPNNTNPFGSTFCFGLQRMIFEVMQNNHIASVTLYGPPRPGAHLRTAELP

SEQ ID NO: 2504 - DNA, 2952 bp, Homo sapiens
  ref <308>: DATABASE ACCESSION NUMBER: Refseq / NM_025187
  ref <309>: DATABASE ENTRY DATE: 2002-12-23
ggcacgagggtggtgttgggccggtgctgctgccgctgccgccggggaggaggtggaaagcggggctgtggcgggccggcgggggcggcctgtcagccgctgctttgtctccttagctcgggtcccttctgcgctgccgcagggaggccgcccgggccaggcgagccgaaccaatgctggacctggaggtagtgcccgaacgctctctggggaacgagcaatgggaattcacgctgggaatgcctctggctcaggcagtagccattcttcagaagcactgtcgcatcatcaaaaacgtccaggttctctacagtgaacagtctcctctaagccatgacctcattcttaacctgactcaggacgggatcaaactaatgtttgatgctttcaatcagagacttaaggtgatcgaagtatgtgatttgactaaagtaaagttaaaatattgtggcgtgcattttaattctcaggccatagctcctaccattgaacagattgaccagtcttttggcgcaacccatcctggagtgtacaactccgctgagcagctcttccatctcaacttcagaggactgtctttctcttttcagttagactcatggactgaggctccaaagtatgagcccaattttgcccatggcctggcttctctccagataccccatggagcaactgtaaaacgaatgtacatctacagtggcaacagcctgcaggataccaaggctcccatgatgcctctgagctgtttcctgggcaatgtctatgctgagagtgtagatgttcttcgagatggaactggacctgcaggtttacgacttcgcctacttgctgcaggttgtggacctggcctattagcagatgccaagatgcgggtatttgaacgttcagtgtattttggtgattcctgccaagatgttcttagcatgcttggctctccacacaaagtcttctataaatcagaagacaagatgaaaattcattctccttcccctcataaacaagttccatcgaagtgtaatgactacttttttaactacttcactcttggagtggacatcctctttgatgcgaatacacacaaagtgaagaagtttgttctacacaccaattaccctgggcattataatttcaacatttatcatcgctgtgagttcaagatcccactagccataaagaaagaaaacgcagatggtcagacagaaacatgcacgacctacagcaagtgggacaacatccaggagctcctgggccaccctgtggagaagcctgttgtcctgcacaggtcttcctccccaaacaacaccaacccatttggttccacattctgctttggtcttcagcgaatgatctttgaggtcatgcagaacaaccacattgcctcggtgaccctgtatggcccccccaggcctggtagccacctgagaacagcggaactcccctagggacaccaccacccatgcccctctgtcccgtggaactgtgcatcacatcctgctcagtgggcctctgtaccaccctgtgggttttcttggacacctggccagtgctgaagggctgttgtgatgttctgaggttgggctcaggctgggtgctctgccatgggctgagtggcccagatattcttctgtccatctttggcctgctggtgccagcaggggacacagactgcaaagagaagcacaaagtttgagccttgattcctggacccaggagctctcaactaacaaggaggcaggagaggtcaacccttgtcccatgcacattgggaagacttggggctctttctgtgactgaggacacaggcacccaggataaggacaaggtcctgcctttggctccacattgccacatgacccttaaggcaagcaggtagcgtgtccatagtacttggttgcgacatttgcactacatccactttagttacttgatgagctggctgtggccagggtggcccacctgcccttccctgttcctttcttgcacgcgctccctgcctgggcacaccaaactggttgaaacacagctttctaccatccaggtacatgcccaggcctggttctcacccctgttggagtcagctttcaagattgcctgtgcccctgctctgccccatcctggctggcagggctgcatgtttccatcctgtttgcctcttttatttaatgccaaagttttagccaaagacatcttcctacttttgttgtgtttcagcattctgttctgcactgtgggctggctctctgccccaaccctgggcactggcccctggctgggccatttcatggctcaaagcctctgggggctcaaggaaggctgggctgctcagtcccttcatgggtcttgctaatggaaagtagcatatatgtgctttaaaaatattaatccttttgaaaagaactgagaagaaaaatgtataattttatcccatttttaatattttggtctagcaacttgtgatacatagatgacaattttgtgagtttttcaaatgtgtgtacagatttttgtaaatatgactcttttgtaattaactcatgtacagcctcatcctgtatagtttaatgatgaatgtgcaggggacctgtctcaggctcctatatggttcctgggccttatagccaggtttgtgtggcgctcccgacttttgtgactgactggtgtcttcccatttggactgtggcctggccagagccccttgcatatccccactgtcaggggcagccaggactgttcccatcctcctggaatgggggaaccttccttatcccctgcccacatcccctctccaataaagcacctgtgccctcagcaatggcctgccatgtgctgttgctgggatgtttgtattaaaaaaaaaaaaaaaaaaaaaaaaaaaaaaaaaaaaaaaaaaaaaaaaaaaaaaaaaaaaaaaaaaaaaaaaaaaaaaaaaaaaaaaaaaaaaaaaaaaaaaaa

SEQ ID NO: 2505 - protein, 422 aa, Homo sapiens
  ref <308>: DATABASE ACCESSION NUMBER: Refseq / NP_079463
  ref <309>: DATABASE ENTRY DATE: 2002-12-23
MLDLEVVPERSLGNEQWEFTLGMPLAQAVAILQKHCRIIKNVQVLYSEQSPLSHDLILNLTQDGIKLMFDAFNQRLKVIEVCDLTKVKLKYCGVHFNSQAIAPTIEQIDQSFGATHPGVYNSAEQLFHLNFRGLSFSFQLDSWTEAPKYEPNFAHGLASLQIPHGATVKRMYIYSGNSLQDTKAPMMPLSCFLGNVYAESVDVLRDGTGPAGLRLRLLAAGCGPGLLADAKMRVFERSVYFGDSCQDVLSMLGSPHKVFYKSEDKMKIHSPSPHKQVPSKCNDYFFNYFTLGVDILFDANTHKVKKFVLHTNYPGHYNFNIYHRCEFKIPLAIKKENADGQTETCTTYSKWDNIQELLGHPVEKPVVLHRSSSPNNTNPFGSTFCFGLQRMIFEVMQNNHIASVTLYGPPRPGSHLRTAELP

SEQ ID NO: 2506 - DNA, 6314 bp, Rattus norvegicus
  ref <308>: DATABASE ACCESSION NUMBER: Refseq / NM_017269
  ref <309>: DATABASE ENTRY DATE: 2002-11-05
ggaaacccgggacggacggagcggggactaggcggaccgactggcggagaaggaggcggaggcgtcgactggagacggagaccagggcgcccggcttcgggcacacggcggggcgcgtcccgggcacgttccagggcgcgcagggcatgaagcccgcggcgcgggagacgcggacacccccgcgctcgcccgggctccgctgggcgctgctgccgctgctgctgttgctacgccagggccaggttgtgtgcacaggtgcggcgcccagtcctgtatttgacgttgaagctgtcaccagccctaccagtgtggtattaacgtggaaacacaatgattcagccacttcagaatataagataaatgagggaaacacgctgcggtatactgttaaaaaccagacatcatttaacatcacaggcttaagcccagctacttcctacaaattctccatcaccttgggaacagtcaatgagacctcaggaaagcccacatacaaaaatatcacaacagagccctggccagtgtcggatctccaagtcgcctacatcggtgtgacacaggctcttctcgcctggagcaatgcaaacggcaccgcttcttaccggatgcagattgtagagctgaccacaaattcatcaggtggtatttcagatctgaagccggggacccataagagcttggctgtccaaggatcgaatgagacccagcatgacttatgggtcacagaaggcgtctcggacccaccctctgcccgggatccctccctcacagaggtcttgctcactgagctaaagcctgatactcagtacaaagtcaccatttattctcaagcagcagatggcacagaaggacagcctgggaacaaagtgtttaaaacaaatcccatccaagtttctgacatccgagctgtgaacatcagtgactcgaacatgaccctgacctggaaaagcaacaataatgagtcccatgcttcatttacctacaaaatatacgtggctgggggttccgactccatcaacgaaactgtcaatgagactcaggccgtcatccgtggactcagctccagtaccttgtacaacatcacagtgcttcctttcctgggtcagaccgcgggtataccaggcttcctccaagtgtacacttccccccgtcctgtttctgacttccgagtgacaaatgtcagcctgagggaaatcggtttggcttggagaagcaatgactcggagtcattcgagattttcatcacgcaggagggaagtgagaaacgttggaatgcttcgacgggagacctgagctatatcgttgtaaatttaaagcctgggaccagttaccaatttgaaatattcccacgaggaccaaatgggactgaagggccatcccagacagttgttggtagaactgactgcagtgctgtgactgacatccgcgtggtcagcgttagcaccactgaaatacagctggagtggcagaatacagacagtgcttctggatacacttaccatttagttctagagtctgagaatggctccatcaagaccaacagttctcagaaatggatcacagtggggggccttaccccaggcaccttatacaatgttacaatctttccagaagtggaccagatggagggcaactccagctctattacccagtacacaaggcccagcaatgtgtcctacattgaagtaaacaccaacaccaccgtgggagccatccagtggaagaacctggacgcagcctctgcttcctactcctactccgttcttatcttgaaggctggagatggcagcaatgtaaccagcagggtcagagacatcccttctgtcaccatccctgggctaatccccggcgtctcttccgaagtgaagatctttacaaagattaggaatacagaggttgggaatgaggtacctggtcagaagctgttctgtatggaacctgcacaagtggattccttacactgtgaagtggtcccgaaggagccagcgctggttctgaagtgggcctgcccccctggcatgaactcaggctttgaactgggggtcaggagtgatgcttgggacaatatgacacacttggagaactgcactttggacaatgacacagagtgcaggacagaagtcacctatttgaatttttctacctcgtacaacatcagcattgccaccttgtcatgtggaaagatggcattgcccacccagagcacctgcaccactggcatcacagacccacctcctccagatggatcccctaatattacatcggtcagtcacaattcagtaaaggtgaagttcagtggttttgaagccagccatggacctatcaaagcctatgctgtccttctcaccacaggggaagctggccaaccctccacagatgttttgaagtacacatatgaagatttcaaaaagggagcctccgatacttatgtgacatacctcataaggatagaagagaagggacagtctcagggcttgtctgaagcattgaactatgagattgatgtggggaaccaatccactaccctcggctactacaacgggaggctagagcctctgggctcctaccgggcttgcgttgctggctttaccaatattacctacaaccttcagaacgatggccttattaatggggatgagagctatgtatctttcagtccgtattcagaggccgtgtccttgcctcaagatccaggtgtcatctgcggagcggtgttcggatgtatctttggtgccctggccattgtggctgtgggaggcttcatcttctggagaaagaaaaggaaagatgccaagaataatgaagtgtccttttctcaaattaaacctaaaaaatccaagttaatccgagtggagaattttgaggcctactttaagaaacagcaagccgactccaactgtgggtttgcagaggaatatgaggatctgaagctgattggaataagtttacctaaatatgcagcggaaatagctgaaaacagggggaagaaccgctacaacaacgtcctgccctatgatatttctcgagtcaaactttcagtccagacccattcgacagacgactacatcaatgccaactatatgcctggctaccattccaagaaagatttcattgccacacaaggacctttacccaacactttgaaagatttttggcgtatggtttgggagaaaaacgtatatgccattgttatgctgaccaaatgtgtggagcagggaaggaccaaatgtgaagagtactggccttccaagcaggctcaggactacggggacataactgtggcaatgacatcagaagttgttcttccggaatggaccatcagagattttgtggtgaaaaatatgcagagtagtgagagtcatcctctgcggcagttccatttcacctcctggcctgaccatggtgttcctgacaccaccgacctgctcatcaactttcggtacctggtccgggattacatgaagcagatcccccctgagtcaccaatcctggtgcattgcagtgctggggttggaaggacgggcactttcattgctattgatcgcctgatctatcagatagagaacgagaacaccgtggatgtgtatggcattgtctacgatcttcggatgcacaggcctctgatggtacagacagaggaccagtatgttttcctcaatcagtgtgtgttggatattatcagagcccagaaagactcaaaagttgacctcatctatcagaacacaaccgcaatgacaatctatgaaaacctcgagcgagtgagcatgtttggaaaggctaatggttacatcgcctagtgccaaagcaaacccttctgaagctaaccagaccgtcacacccacagtgaaggagaacgccctgacggggacatgttttatgtgtctcatttctcaattctttgttctgttctgttagaactacttggagggcatggggctgtgcatgtaaaacatggcagataggcagttggggctctcaggggctgtgggcaggtggtgtgtaaatcagctgcattcctgattaccaatgggatgggttcactttctgtttttctttccttgagaattgtggaaaaccaggaaaagtgagctatgtttttgttttccaagcaggtttgttctcctctctttctattcctcccccttctctctctccctcccctgcctctctctgttttttttttttaagacttttatatgattcacatgctaaagccaggattatgttgggttggatatattttaagtatcagaggtctatttttacctactgtatctcggaatctagccgatggaaaagcatggctgtgggtgtttctcatgcagggaggggcacccggtgcctcttctgcgtgggtttctatttgaacatgtgccttttctgaattatgcttccacgggcaaaactcagtagatatctctatttttatattgaatctcagaattggaatatacagaatatttaaacagtagcttagtatcagaggttcgcctcctcagtaacattcctgtcccatcccattagaggaggctttctctgcggcccgcccttgacacacatttgtgctccatgttccttttccttcctttctttttttttttttctcccctcccagttttcgccaaagaacttctgttggtgagattttcatcccattggttgggtgagaatagaagtttaaaatatcaccatgagactctctgtgggtgggagtggggaggaacagaggaatcaacataccatggtgtgtgcaccccttttcatcccgcctcctatgttctctcatttctgtctttggtaagaaggatttttttaaaggtgcaatatgtgacgtgggggttcacgatgctctgggttcttagtaatgttttactcaggttgtcatttatgtgtgtatgtgtgtgtgtgtgtgtgtgtgtgtgtgtgtgtgtgtatgtatgtatgtgtgttttatagcgtggtgatctgtgaacatttcagtgtgaactcagattaacccctttccccccaaagtccactggctttagtctctctgcagtgacacacatcagtatctactgtatatataaatactaaactcttacacaccagtcattcctatgaattgaggtgtacaaagtttgatttgtatcaaagatgtaattattatttttaaaacctctttcactacactgctgctgtaattactttgaatttttaaagaaaaatgtagatttttttgttttgtttttggcttcaggtgtgtattcaccaagagtttcagaatttatgtggttttattttattggtacataatctgcaaacttctcaaggcattaacatgacaagatttgtatctcttatttttatcttgtggctcaggttatatttgaagaagtttcaagtttattttctagtaggcagtgaagtatacataaggtcaatgaaggaatcaccaggtccctggagtcctgtggctgttttccacagttacacatcctgctgtatgtttgggaccatgggtattgtgttgaagatgagggcaggggtcttctccgaggacctggccactgtgagccctggggtaacctgtcctctgatgttctgcactctgttcctcgaatcaccggcactttgatgcctgactggacctgatcatgagtgtttgtagggttagagagcctgaaccatgatgtactgaaagccctcgctgtggttcagcactgtagtgtgcgattcttgctgtgacccagcgctgctgtagcactgttgctgccgtggctcggcgctggggcacaacccctttccctttgcggtactgaaaggattgaaagaagaggtcatggcgctgtcatgctctgggggagaattttacttctcacatggaaactgcactttttgctaaatcctttgcattttgatgttcacttagtgtccagccctttaggatgggctggccagggtaggttggccccctggactcaacttcactggggaacttgacgctgcagttgtgaatcagggaagccatgctgtctccaggtatggggtgaagctgaacatgggctcattatttccaaatgccctgtctggtctgctcactaggatgtgctgactttgggcactatacagaggggcctgttctggcagtagttctgtgcaccgcctatacacctcagtctgtcaggaacggttgtagtgggtggtaaggggtccaatcccacgcagcgcctatgccctgcctctgctgccatggaaagtgcgaggaaaggacccgcccctaaaacagccctgtagaagattagagtccctcaaaaaaaaaaaaaaaactcgag

SEQ ID NO: 2507 - protein, 1216 aa, Rattus norvegicus
  ref <308>: DATABASE ACCESSION NUMBER: Refseq / NP_058965
  ref <309>: DATABASE ENTRY DATE: 2002-11-05
MKPAARETRTPPRSPGLRWALLPLLLLLRQGQVVCTGAAPSPVFDVEAVTSPTSVVLTWKHNDSATSEYKINEGNTLRYTVKNQTSFNITGLSPATSYKFSITLGTVNETSGKPTYKNITTEPWPVSDLQVAYIGVTQALLAWSNANGTASYRMQIVELTTNSSGGISDLKPGTHKSLAVQGSNETQHDLWVTEGVSDPPSARDPSLTEVLLTELKPDTQYKVTIYSQAADGTEGQPGNKVFKTNPIQVSDIRAVNISDSNMTLTWKSNNNESHASFTYKIYVAGGSDSINETVNETQAVIRGLSSSTLYNITVLPFLGQTAGIPGFLQVYTSPRPVSDFRVTNVSLREIGLAWRSNDSESFEIFITQEGSEKRWNASTGDLSYIVVNLKPGTSYQFEIFPRGPNGTEGPSQTVVGRTDCSAVTDIRVVSVSTTEIQLEWQNTDSASGYTYHLVLESENGSIKTNSSQKWITVGGLTPGTLYNVTIFPEVDQMEGNSSSITQYTRPSNVSYIEVNTNTTVGAIQWKNLDAASASYSYSVLILKAGDGSNVTSRVRDIPSVTIPGLIPGVSSEVKIFTKIRNTEVGNEVPGQKLFCMEPAQVDSLHCEVVPKEPALVLKWACPPGMNSGFELGVRSDAWDNMTHLENCTLDNDTECRTEVTYLNFSTSYNISIATLSCGKMALPTQSTCTTGITDPPPPDGSPNITSVSHNSVKVKFSGFEASHGPIKAYAVLLTTGEAGQPSTDVLKYTYEDFKKGASDTYVTYLIRIEEKGQSQGLSEALNYEIDVGNQSTTLGYYNGRLEPLGSYRACVAGFTNITYNLQNDGLINGDESYVSFSPYSEAVSLPQDPGVICGAVFGCIFGALAIVAVGGFIFWRKKRKDAKNNEVSFSQIKPKKSKLIRVENFEAYFKKQQADSNCGFAEEYEDLKLIGISLPKYAAEIAENRGKNRYNNVLPYDISRVKLSVQTHSTDDYINANYMPGYHSKKDFIATQGPLPNTLKDFWRMVWEKNVYAIVMLTKCVEQGRTKCEEYWPSKQAQDYGDITVAMTSEVVLPEWTIRDFVVKNMQSSESHPLRQFHFTSWPDHGVPDTTDLLINFRYLVRDYMKQIPPESPILVHCSAGVGRTGTFIAIDRLIYQIENENTVDVYGIVYDLRMHRPLMVQTEDQYVFLNQCVLDIIRAQKDSKVDLIYQNTTAMTIYENLERVSMFGKANGYIA

SEQ ID NO: 2508 - DNA, 486 bp, Rattus norvegicus
  ref <308>: DATABASE ACCESSION NUMBER: EMBL / AA893074
  ref <309>: DATABASE ENTRY DATE: 2000-03-03
tagggagttctggcacaacgtacacgtgtctggcttcctgccagtactgctcgtgcccagcattctccttctcagtgttaaggaagagtgacagcctgctgtgtaagcatcttctggcaatttatcttagtcagcttctgaggaactgccagcagctcagtgtgtctgacaagcaactgacagacctgttattgatggagaggacacaagaagcataaaagatgtggctggaacatggacttccaagacagaagcctagcaggaaatatttcacatcttcaacgcacaaggtggaggaatgggatgcacttccagacttgtgactgtcactttgccctcacaggctgcagagggtgtgtgcggttaagagccctctatgatcttaatatcaaccagcctctgagccccacaggtagaaatctccctgagtagaattaaatagtgttgactcaaataaagcctgagccatgttgtgcctgcaagtgg

SEQ ID NO: 2509 - DNA, 1034 bp, Rattus norvegicus
  ref <308>: DATABASE ACCESSION NUMBER: Refseq / NM_022525
  ref <309>: DATABASE ENTRY DATE: 2003-01-13
cagatgggtgcgagagatgccagtggaacgagtgagaagaaggactgtcctccagagagggggatgtgtccctgcctgggagcctaagcctgaatgcactaagggccaccccaaagacgcgccccagcccgccatgtcccggatccttcgggcatcctgcctcctgtccctgctcctggccgggtttgttccgccgggccggggacaagagaagtccaagacagactgccatggcggtatgagcggtaccatctacgagtatggagcccttaccatcgatggggaggaatacattccttttaagcagtatgctggcaaatacatcctctttgtcaacgtagccagctactgaggtctgacagaccaataccttgaactgaatgcactacaagaagaacttggcccattcggcctggtcattctgggcttcccttgcaaccaatttggcaaacaggagccaggcgagaactcggagatcctgcctagtctcaagtacgttcgaccgggtgggggctttgtgcctaatttccagctctttgagaaaggagacgtgaacggggagaaagagcagaagttctacactttcctgaagaactcctgccctcccactgcggaactcctgggctcacctggccgcctcttttgggaacccatgaagatccatgacatccgctggaactttgagaagttcctggtggggccagatggcataccaattatgcgctggtaccaccggaccacagtcagcaacgtgaagatggacatcctgtcctatatgaggcggcaggcagccctgggggccagagggaagtaactgatgccctaccccaccccaccccatcccctgcccatcatgcaagggctggggaggggctcttcaggaaggaagcaaaaaacggaatcattctacacatacatcccagattcccttccttattacataaaagacaagcttggcacactgtgtgcctgtaccactgtgcacatcgtggcaactgtcccactgtgtgccatgcactgcctgcctggaaccc

SEQ ID NO: 2510 - protein, 226 aa, Rattus norvegicus
  misc_feature (1)..(226): Xaa=Unknown amino acid
  ref <308>: DATABASE ACCESSION NUMBER: Refseq / NP_071970
  ref <309>: DATABASE ENTRY DATE: 2003-01-13
MSRILRASCLLSLLLAGFVPPGRGQEKSKTDCHGGMSGTIYEYGALTIDGEEYIPFKQYAGKYILFVNVASYXGLTDQYLELNALQEELGPFGLVILGFPCNQFGKQEPGENSEILPSLKYVRPGGGFVPNFQLFEKGDVNGEKEQKFYTFLKNSCPPTAELLGSPGRLFWEPMKIHDIRWNFEKFLVGPDGIPIMRWYHRTTVSNVKMDILSYMRRQAALGARGK

SEQ ID NO: 2511 - DNA, 373 bp, Homo sapiens
  ref <308>: DATABASE ACCESSION NUMBER: EMBL / AI245240
  ref <309>: DATABASE ENTRY DATE: 2000-03-03
tttttttttttttttttttttttttttttggcggcaaaaaggctttaacggggcaaacggggggagccccaacccaggggaccagggaggggggagggcacgccccccgaaggagcagggggggcatccctgcccaggggcctaaccctgaaggcactaagggctggcccctcaaacaggctcagggaggcccgcccacaagggcttggggcccctccctcatgaaaaccccacccctgccagggggcccggggcccttgctatcacatctgcctgtggtgaactcaaggaggtgatccctctcagggaaaactgggggggggggaggacccttgggagggcccttcaggaaataggaaggggggggtgggga

SEQ ID NO: 2512 - DNA, 3488 bp, Rattus norvegicus
  ref <308>: DATABASE ACCESSION NUMBER: Refseq / NM_024154
  ref <309>: DATABASE ENTRY DATE: 2003-01-13
cacacacacacacacacacacacacacacacacacacacacacacagaacctgcgcctgtgcctgtgcctgtgcctgtgcctgtttgagagctggagacacagaaggatccccttggcaaggatggaattgaagaccgaggaggaggaggtgggtggtgtccagccggtgagcatccaggctttcgccagcagctccacgctgcatggtcttgcccacatcttctcctatgagcggctgtctctgaagcgggcactgtgggccctgtgcttcctgggttcgctggccgtcctgctgtgtgtgtgcactgagcgtgtgcagtactacttctgctatcaccacgtcaccaagcttgacgaagtggctgcctcccagctcaccttccctgctgtcacactgtgcaatctcaatgagttccgctttagccaagtctccaagaatgacctgtaccatgctggggagctgctggccctgctcaacaacaggtatgagatcccggacacacagatggctgatgaaaagcagctagagatattgcaggacaaggccaacttccggagcttcaagcccaagcccttcaacatgcgtgaattctacgacagagcggggcacgatattcgagacatgctgctctcgtgccacttccgtggggaggcctgcagcgctgaagatttcaaagtggtcttcactcggtatgggaagtgttacacattcaactcgggccaagatgggcggccacggctgaagaccatgaaaggtgggactggcaatggcctggagatcatgctggacattcagcaagatgaatatttgcctgtgtggggagagaccgacgagacatccttcgaagcaggcatcaaagtgcagatccacagtcaggatgaaccccctttcatcgaccagctgggctttggtgtggctccaggtttccagacgtttgtgtcttgccaggagcagaggctcatctacctgccctcaccctggggcacctgcaatgctgttaccatggactcggatttcttcgactcctacagcatcactgcctgccggattgattgcgagacgcgttacctggtggagaactgcaactgccgtatggtgcacatgccaggggacgccccatactgcactccagagcagtacaaggagtgtgcagatcctgccctggacttcctagtggagaaagaccaggaatactgcgtgtgtgagatgccttgcaacctgacccgctacggcaaggagctgtccatggtcaagatcccaagcaaagcctccgccaagtacctggccaagaagttcaacaaatcggagcagtacataggggagaacattctggtgctggacattttctttgaagtcctcaactatgagaccatcgagcagaaaaaggcctatgagatcgcagggctgttgggtgacatcgggggccagatggggttgttcatcggtgccagcatcctcaccgtgctggaactctttgactatgcctacgaggtcattaagcacaggctgtgcagacgtggaaagtgccagaaggaggctaagaggagcagcgcagacaagggcgtggcgctcagcctggatgacgtcaaaagacacaatccctgcgagagcctccgaggacatcctgccgggatgacgtacgctgccaacatcctacctcaccatcccgctcgaggcacgtttgaggactttacctgctaagccctcgcaggccgctgtaccaaaggcctaggtggggagggctgggggagcaaggggcccccaactgcccccagctaccctgtggacttaactgcattcctggtcagtggttccctcttgtctgtggtgagaaaggagtcttgaccatagagtcctctcccagcctctatcccatctttttattttaatttaatcacatttgctctgtaatattgcttgaggctggggatcgtgatttccccccagttcttttattgttgagaatagttttctctattctgggttttctgttatttcaaatgaatctgcaaattgctcttcccatctctatgaagaattgcgttggaattttgatggggattgtattgaatctgtagattgcctttggtaagatggccatttttactatgttaatcctgccaattcatgagcaagggagatctttctatctctgaaatctacttcagtttctttcttcagagacttgaagttcttgtcataaaaatctttttggttagagccacaccaaggtattttatattgtttgtgactattgtgaatggtgtcatttccctaatttccttctcagcctacttatcctttgagtagaggaaggcttctgatttgtttgggttaattttatacccagctgctttgctaaagttctttatcaggtttaggtgttctctggtggaacttttggggtcacgtaagaatactattatatcatctgcaaatagtgatatttcacttcttcctttccaatttctatccctctggggactttttgttgtctaattgctctggctaggacttcaaattctatattgaatagatagggagagagtgggcagccttgtctagttcctggttttcgtgggatcgcttcaaatttctctccatttagtttgatattggctactggtttgctgtatatggcttttactgtacttaggtatgggccttgaattcctgatatttccaagacttttaacatgaaggggttttgaaatttgccaaatgctttctcagcatctaatgagatgatcatgtgccctccccccaccttgagtttgtttatatagtgggttacatgaaaggatcatttctaatagtccacaagtctgccaaatcttgctgattgtgactcatttccatagcaggctctataacttctctaacagattgcattaaactctgcttggggaaggcattacctcttggttgaagcaatgttgtagtttctatgcctgctgagtaaatagcctcaagtccaagtacttgcccagactaatgatcaaacgtatccaggagttccataccagagatgtactcttctctcctttgaagtacattgctggaagagtaattgtgtttgctagagatactccttcgaactgcaaaagaaatctcttggctaagcatataatcaagcctcaggttttctttttattaaatagctgcttgtaagaaagtggacactaagcatatacctcaaagggagacagaatgactctgtgccttcactgatggaagtctgggttacaaattacatcagaagaacctatcatagtgaaacatctcattcccctggtataatcccttctagaaatacacttgtgactctgaaatgttataatcgtgacaactaggctgttacagatacaccaagttaaatttgatagagaaaccaggcttggagcctcatgtccatagggcaagaggaagatgctgagtgtttaaggttggtttgagcgaagaacaataccttgtgtcacaaaaatg

SEQ ID NO: 2513 - protein, 526 aa, Rattus norvegicus
  ref <308>: DATABASE ACCESSION NUMBER: Refseq / NP_077068
  ref <309>: DATABASE ENTRY DATE: 2003-01-13
MELKTEEEEVGGVQPVSIQAFASSSTLHGLAHIFSYERLSLKRALWALCFLGSLAVLLCVCTERVQYYFCYHHVTKLDEVAASQLTFPAVTLCNLNEFRFSQVSKNDLYHAGELLALLNNRYEIPDTQMADEKQLEILQDKANFRSFKPKPFNMREFYDRAGHDIRDMLLSCHFRGEACSAEDFKVVFTRYGKCYTFNSGQDGRPRLKTMKGGTGNGLEIMLDIQQDEYLPVWGETDETSFEAGIKVQIHSQDEPPFIDQLGFGVAPGFQTFVSCQEQRLIYLPSPWGTCNAVTMDSDFFDSYSITACRIDCETRYLVENCNCRMVHMPGDAPYCTPEQYKECADPALDFLVEKDQEYCVCEMPCNLTRYGKELSMVKIPSKASAKYLAKKFNKSEQYIGENILVLDIFFEVLNYETIEQKKAYEIAGLLGDIGGQMGLFIGASILTVLELFDYAYEVIKHRLCRRGKCQKEAKRSSADKGVALSLDDVKRHNPCESLRGHPAGMTYAANILPHHPARGTFEDFTC

SEQ ID NO: 2514 - DNA, 3923 bp, Homo sapiens
  ref <308>: DATABASE ACCESSION NUMBER: Refseq / NM_020039
  ref <309>: DATABASE ENTRY DATE: 2003-01-15
gagccagcgagccagcgcgcgcgggcgggcggacagatcggagccgagcggggccgggcggggcgctccctgcagggctctgcgcggcgtgccgcggcggccgcgggctccggccccgggccatgagcccctccgcgactcggcgctgagcccgccaccggtccagcgccccaggacccgccgccggctgccggcttgccgaagccccctcaggatcccctcaacaaggatggaactgaaggccgaggaggaggaggtgggtggcgtccagccggtgagcatccaggccttcgccagcagctccacactgcacggcctggcccacatcttctcctacgagcggctgtctctgaagcgggcactgtgggccctgtgcttcctgggctcgctggctgtgctgctgtgtgtgtgcacggagcgtgtgcagtactacttccactaccaccatgtcaccaagctcgacgaggtggctgcctctcagcttaccttccctgctgtcacgctgtgcaacctcaacgagttccgctttagccaagtctccaagaatgacctgtatcatgctggggagctgctggccctgctcaacaacaggtatgagataccagacacacagatggcagatgaaaagcagctggagatactgcaggacaaagccaacttccgcagcttcaaacccaaacccttcaacatgcgtgagttctacgaccgagctgggcacgacattcgagacatgctgctctcctgccacttccggggggaggtctgcagcgctgaagacttcaaggtggtcttcacacgctatggaaagtgctacacgttcaactcgggccgagatgggcggccgcggctgaagaccatgaagggtgggacgggcaatgggctggaaatcatgctggacatccagcaggacgagtacctgcctgtgtggggggagactgacgagacgtccttcgaagcaggcatcaaagtgcagatccatagtcaggatgaacctcctttcatcgaccagctgggctttggcgtggccccaggcttccagacctttgtggcctgccaggagcagcggctcatctacctgcccccaccctggggcacctgcaaagctgttaccatggactcggatttggatttcttcgactcctacagcatcactgcctgccgcatcgactgtgagacgcgctacctggtggagaactgcaactgccgcatggtgcacatgccaggggatgccccatactgtactccagagcagtacaaggagtgtgcagatcctgctctggacttcctggtggagaaggaccaggagtactgcgtgtgtgaaatgccttgcaacctgacccgctatggcaaagagctgtccatggtcaagatccccagcaaagcctcagccaagtacctggccaagaagttcaacaaatctgagcaatacataggggagaacatcctggtgctggacattttctttgaagtcctcaactatgagaccattgaacagaagaaggcctatgagattgcagggctcctgggtgagctgctgatgacacctgtccccttctcatgccatgggcatggcgtggctccctatcatccaaaagcagggtgctcacttctgtcccatgagggtcctccaccccagaggcccttccccaaaccctgttgtcttggtgacatcgggggccagatggggctgttcatcggggccagcatcctcacggtgctggagctctttgactacgcctacgaggtcattaagcacaagctgtgccgacgaggaaaatgccagaaggaggccaaaaggagcagtgcggacaagggcgtggccctcagcctggacgacgtcaaaagacacaacccgtgcgagagccttcggggccaccctgccgggatgacatacgctgccaacatcctacctcaccatccggcccgaggcacgttcgaggactttacctgctgagccccgcaggccgctgaaccaaaggcctagatggggaggactaggagagcgagggggcccccagctgcctcctcacatctgccctggggactccccacactccggggcagatctttcctcttgtctgtggtaaggaaggagtcttgaccatagagtcctctctctgcctctatcccattctttttacatttaacaaaactaatctaaaaaagaactaaaaagggagaacggggcaagggacctcaggctgcccctctctcctccatgctgcctcccctagctcccagcctgaattctgtctatctagctgtctgccatctgagtgtccatctacattctgctgccaccagtcaccaaaggcccttcccagtgaggggtggaagggatctctggggtctggaatttggccccaaaccagagaatgtaccttaagggggagggctagtgtgggggagggaggcttccccagccttaagagaccctctcagcccagtgactgtccccaaacccaagtctcctggcaggaactaaaacctcagccccactctctcacaccatgtggaatctcgtgggggtcggggatccccttaagaagtggtaatggggacaagatgcggccctggtgctgtaggctacatcctgatacctataagttcacccccaccccacagctgctggagagaaatcccaagaggcagcccttcctcaccatcccattaaagacctggctggttagcgtccagctcagggagaagggcgctagtgcctaacctcactggtccctctcccggaggcccttgtagagggccacgtccataaattttcttatggaactctcccacatcctcttccccaacttcatttgcttctctcaacaacctcatctgcattttctatttctatatgatacagactctatattgctatatctctgtatatactttcccagccctgtctgtctccaccccatcccctcttgtctctgagaaccattctcccaccccaagttccaccttctatgtttctactccctccctggtctctgaatgccttcgcctgtataaagagttggactctctcccctggtgtctgtactgtgtacacacatccctctgagaagcacaaggagacgacacgcgcattgtaacctttgcactgtctcagtggcgacaaaggaagctgtgaatcacaagctctgcctctttctggcctcaccctctcccccaacccgggcaccctcggccctccctgcagccttaacattctcttcccctgctcctcctatcccattgccctctgcccagctgacagtggcatccccagggaaggggttgctgtagagatagcccccacccaggggatggaggtctaccctggacactaagccaagtgtgtcagagacagaagggagctggggattggcgactcctgaagttggggcagtgggatgctgacaggcagaagctgaggtcctcagtcagtggcctttcctccttctgggtgcccagccccctttcctcacctgatacccaagcccaccacttttattttctggtgaggtgggtttgggaggaaagagaggcctagaggaggagttgaaagctctgctgttgtctcaccctatcttaatgagagacaagtgaggtggagggcctgccccccctccctccaccagacactccttccaggcctgagccccaacccctcttcaggccttccttccctagctgtgtcttggtcttcaatcccagaacaggacctgtgagcagctgcattggcctggagctggagagtaaggctgtaggatctttggaatctcttggttcctaagagtttcctcagagatcatacctccccagagggaagcaggaatgaggccaaaaagtgtgcattggataggggaacagcaggcagggctctgggtgacgcatgcctctggtctaataaactgggtttcaaccaaaaaaaa

SEQ ID NO: 2515 - protein, 574 aa, Homo sapiens
  ref <308>: DATABASE ACCESSION NUMBER: Refseq / NP_064423
  ref <309>: DATABASE ENTRY DATE: 2003-01-15
MELKAEEEEVGGVQPVSIQAFASSSTLHGLAHIFSYERLSLKRALWALCFLGSLAVLLCVCTERVQYYFHYHHVTKLDEVAASQLTFPAVTLCNLNEFRFSQVSKNDLYHAGELLALLNNRYEIPDTQMADEKQLEILQDKANFRSFKPKPFNMREFYDRAGHDIRDMLLSCHFRGEVCSAEDFKVVFTRYGKCYTFNSGRDGRPRLKTMKGGTGNGLEIMLDIQQDEYLPVWGETDETSFEAGIKVQIHSQDEPPFIDQLGFGVAPGFQTFVACQEQRLIYLPPPWGTCKAVTMDSDLDFFDSYSITACRIDCETRYLVENCNCRMVHMPGDAPYCTPEQYKECADPALDFLVEKDQEYCVCEMPCNLTRYGKELSMVKIPSKASAKYLAKKFNKSEQYIGENILVLDIFFEVLNYETIEQKKAYEIAGLLGELLMTPVPFSCHGHGVAPYHPKAGCSLLSHEGPPPQRPFPKPCCLGDIGGQMGLFIGASILTVLELFDYAYEVIKHKLCRRGKCQKEAKRSSADKGVALSLDDVKRHNPCESLRGHPAGMTYAANILPHHPARGTFEDFTC

SEQ ID NO: 2516 - DNA, 546 bp, Rattus norvegicus
  ref <308>: DATABASE ACCESSION NUMBER: EMBL / AA894080
  ref <309>: DATABASE ENTRY DATE: 2000-03-03
aaaagttactttggcctgggctcagctggccctttgctggctaaaagcttttcatattttgctgttagccatactggcttctctgtggagctgctgatcagcacgtaatcctgctcttcctttgtcttcccaacaccatctgccagagttggcagcgtcgtgttaggtggctgcttctattgaagcacttggattagaagatgttggacttggattggttaccttttctggccatgtccttgtagctacaccccaaggggttctgggagacccagatagtaaacattacttgaccacaactgagtcctctgggtactggctactgtttcttgtactgtaactgacatagttccttagtatgtcctttcaccccagccctgacaatatagtactagctcagataccttgctttcaggaagccagaagctccctgaccctctcagtacttagagaagccagaagccatgcctcaagtgctggctgcagcccgagtctcttgacaggtctttctatttggttggtttcttgtttgtttttaattggggg

SEQ ID NO: 2517 - DNA, 793 bp, Rattus norvegicus
  ref <308>: DATABASE ACCESSION NUMBER: EMBL / AB008752
  ref <309>: DATABASE ENTRY DATE: 1997-11-14
ttcccttctgtccagtccaacgctgcagcttacctgcaacacctctgcttcggagacaataagatcaaggcagagataaggagacaaggtgggatacagctcctggtggacctgctggatcaccggatgacagaagtccaccgtagtgcctgtggggctctgaggaacctggtatatggaaaggccaatgatgataacaaaatcgccctgaaaaactgtggtggtatcccagcacttgtgagactccttcgcaagaccacagacctggagatccgggaactggtcacaggagtcctttggaacctctcatcatgcgatgccctcaagatgccaatcatccaggacgccctggcagtgctgaccaatgcagtgatcatccctcactcgggctgggagaattcacctcttcaggacgaccggaaaatacagctgcattcatcacaggtgctgcgcaacgccactgggtgcctaaggaatgtaagttcagctggagaggaggcccgccgcagaatgcgggagtgtgatgggctcacggatgccttgctgtacgtgattcagtctgcactggggagcagtgagatcgatagcaagaccgttgaaaactgtgtgtgcatcttgaggaacctctcataccggctagcagcagaaacgtctcagggacagcacatgggcacagacgagctggacgggctgctctgcggggaggccaatggcaaggacgcagagagttctgggtgctggggcaagaagaagaagaaaaagaaatcccaggatcagtgggatggagtaggac

SEQ ID NO: 2518 - DNA, 1128 bp, Rattus norvegicus
  ref <308>: DATABASE ACCESSION NUMBER: Refseq / NM_057156
  ref <309>: DATABASE ENTRY DATE: 2003-01-13
atgcagctgcagttccggagctggatgctggccgcgctcacgctgctcgtggtcttcctcatcttcgcagacatctcagagatcgaagaagaaatcgggaattctggaggcagaggtacaatcagatcagctgtgaacagcttacatagcaaatctaatagagctgaagttgtaataaatggctcttcactaccagccgttgctgacagaagtaatgaaagccttaagcacagcatccagccagcctcatccaagtggagacacaaccagacgctctctctgaggatcaggaagcaaattttaaagttcctggatgcagagaaggatatttctgtccttaaggggaccctgaagcctggagacattattcattatatctttgatcgagacagcacaatgaacgtgtcccagaacctctatgaactcctccccagaacctcacctctgaagaataagcatttccagacttgtgccatcgtgggcaactcaggagtcttgctcaacagcggctgtgggcaggagattgacacacacagctttgtcataaggtgcaacctggctccagttcaggagtatgcccgggatgtgggcctcaagactgacctagtgaccatgaacccctcagtcatccagcgggcctttgaggacctagtgaatgccacgtggcgggagaagctactgcagcgactgcatggcctcaatgggagcatactgtggatacctgccttcatggcccggggtggcaaggagcgtgtggagtgggtcaatgctctcatcctgaagcaccatgtcaacgtacgcacagcttacccttccctgcgcctgctgcacgcagtccgaggatattggctgaccaacaaagtccacatcaaaagaccaaccactggcctcctgatgtacaccctggccacacgcttctgcaatcagatctacctttatggcttctggcccttcccattggatcagaatcagaaccccgtcaagtaccactattatgacagcctcaagtatggctacacctcccaggccagcccccacaccatgcccttggaattcaaggccctcaagagcctacatgaacagggggcattgaaactgactgtcggccagtgtgacggggctacgtaa

SEQ ID NO: 2519 - protein, 375 aa, Rattus norvegicus
  ref <308>: DATABASE ACCESSION NUMBER: Refseq / NP_476497
  ref <309>: DATABASE ENTRY DATE: 2003-01-13
MQLQFRSWMLAALTLLVVFLIFADISEIEEEIGNSGGRGTIRSAVNSLHSKSNRAEVVINGSSLPAVADRSNESLKHSIQPASSKWRHNQTLSLRIRKQILKFLDAEKDISVLKGTLKPGDIIHYIFDRDSTMNVSQNLYELLPRTSPLKNKHFQTCAIVGNSGVLLNSGCGQEIDTHSFVIRCNLAPVQEYARDVGLKTDLVTMNPSVIQRAFEDLVNATWREKLLQRLHGLNGSILWIPAFMARGGKERVEWVNALILKHHVNVRTAYPSLRLLHAVRGYWLTNKVHIKRPTTGLLMYTLATRFCNQIYLYGFWPFPLDQNQNPVKYHYYDSLKYGYTSQASPHTMPLEFKALKSLHEQGALKLTVGQCDGAT

SEQ ID NO: 2520 - DNA, 1153 bp, Homo sapiens
  ref <308>: DATABASE ACCESSION NUMBER: Refseq / NM_006011
  ref <309>: DATABASE ENTRY DATE: 2003-02-13
cttggtcctggcgggcgaacccaccatgcagctgcagttccggagctggatgctggccgcgctcacgctgctcgtggtcttcctcatcttcgcagacatctcagagatcgaagaagaaatcgggaattcgggaggcagaggtacaatcagatcagctgtgaacagcttacatagcaaatctaatagagctgaagttgtaataaacggctcctcatcaccagctgttgttgacagaagtaatgaaagcatcaagcacaacatccagccagcctcgtccaaatggagacataaccagacgctctctctgaggatcaggaagcagattttaaagttcttggatgctgaaaaggacatttctgtcctaaagggaaccctgaagcctggagatattattcattacatcttcgatcgagacagcaccatgaatgtgtcccagaacctctacgagctcctccccaggacttcgccactgaagaataagcactttgggacttgtgccatcgtgggcaactcgggggtcttgctgaacagcggctgtgggcaggagattgacgcccacagcttcgtcatcaggtgcaacctggccccagtacaggagtatgcccgggatgtggggctcaagacagacctggtaaccatgaacccctcggtcatccagcgggcctttgaggacttggtcaatgccacgtggcgggagaagctgctgcaacggctgcacagcctcaatggcagcatcctgtggatccctgccttcatggcccggggcggcaaggagcgtgttgagtgggtcaacgagcttatcctgaagcaccacgtcaacgtgcgcactgcatacccctcgctgcgcctgctgcacgccgttcgcggatactggctgaccaacaaagtccacatcaaaagacccaccaccggcctcttgatgtataccctggccacacgtttctgcaaacaaatctacctctacggcttctggccctttccgctggatcagaaccagaacccagtcaagtaccactattatgacagcctcaagtatggctacacctcccaggccagcccgcataccatgcccttggagtttaaggccctcaagagcctacatgagcagggggctttgaaactgactgtcggccagtgcgatggggccacgtag

SEQ ID NO: 2521 - protein, 375 aa, Homo sapiens
  ref <308>: DATABASE ACCESSION NUMBER: Refseq / NP_006002
  ref <309>: DATABASE ENTRY DATE: 2003-02-13
MQLQFRSWMLAALTLLVVFLIFADISEIEEEIGNSGGRGTIRSAVNSLHSKSNRAEVVINGSSSPAVVDRSNESIKHNIQPASSKWRHNQTLSLRIRKQILKFLDAEKDISVLKGTLKPGDIIHYIFDRDSTMNVSQNLYELLPRTSPLKNKHFGTCAIVGNSGVLLNSGCGQEIDAHSFVIRCNLAPVQEYARDVGLKTDLVTMNPSVIQRAFEDLVNATWREKLLQRLHSLNGSILWIPAFMARGGKERVEWVNELILKHHVNVRTAYPSLRLLHAVRGYWLTNKVHIKRPTTGLLMYTLATRFCKQIYLYGFWPFPLDQNQNPVKYHYYDSLKYGYTSQASPHTMPLEFKALKSLHEQGALKLTVGQCDGAT

SEQ ID NO: 2522 - DNA, 397 bp, Rattus norvegicus
  ref <308>: DATABASE ACCESSION NUMBER: EMBL / AA894016
  ref <309>: DATABASE ENTRY DATE: 2000-03-03
ttcatggccgttagcactgttcaacttgttctcatccttatgattgacagttcacactggaatcaaaggtgaattcatgggagtagaggtgagatatcgttaggcaagtcttcttgtaaggggcctcaagcattgcttcaatatcaatatcgtctgccattttctctactcgcctgtgcggattttcgcgcgcctgtgctcgaatcgggaagtcggctgccgccgccgccgctgctgttgctactgttaagtcactaggcccaggccgcggtaccgcccaacccgaatatcgggccccgagggcgtctaggcccaaacgaatctaaaagaaacaatgggattaaaggagcccgcgacggagagcagggcagcggcttcggcagctcaggatccaccc

SEQ ID NO: 2523 - DNA, 2595 bp, Homo sapiens
  ref <308>: DATABASE ACCESSION NUMBER: Refseq / NM_004902
  ref <309>: DATABASE ENTRY DATE: 2002-11-05
cgggctgggcggttccgcggcctgggcctaggggcttaacagtagcaacagaagcggcggcggcggcagcagcagcagcagcagcagcaatctcttcccgaacacgagcaccacaggcgcccgaaggccggaacaggcgtttagagaaaatggcagacgatattgatattgaagcaatgcttgaggctccttacaagaaggatgagaacaagttgagcagtgccaacggccatgaagaacgtagcaaaaagaggaaaaaaagcaagagcagaagtcgtagtcatgaacgaaagagaagcaaaagtaaggaacggaagcgaagtagagacagagaaaggaaaaagagcaaaagccgtgaaagaaagcgaagtagaagcaaagagaggcgacggagccgctcaagaagtcgagatcgaagatttagaggccgctacagaagtccttactccggaccaaaatttaacagtgccatccgaggaaagattgggttgcctcatagcatcaaattaagcagacgacgttcccgaagcaaaagtccattcagaaaagacaagagccctgtgagagaacctattgataatttaactcctgaggaaagagatgcaaggacagtcttctgtatgcagctggcggcaagaattcgaccaagggatttggaagagtttttctctacagtaggaaaggttcgagatgtgaggatgatttctgacagaaattcaagacgttccaaaggaattgcttatgtggagttcgtcgatgttagctcagtgcctctagcaataggattaactggccaacgagttttaggcgtgccaatcatagtacaggcatcacaggcagaaaaaaacagagctgcagcaatggcaaacaatttacaaaagggaagtgctggacctatgaggctttatgtgggctcattacacttcaacataactgaagatatgcttcgtgggatctttgagccttttggaagaattgaaagtatccagctgatgatggacagtgaaactggtcgatccaagggatatggatttattacattttctgactcagaatgtgccaaaaaggctttggaacaacttaatggatttgaactagcaggaagaccaatgaaagttggtcatgttactgaacgtactgatgcttcgagtgctagttcatttttggacagtgatgaactggaaaggactggaattgatttgggaacaactggtcgtcttcagttaatggcaagacttgcagagggtacaggtttgcagattccgccagcagcacagcaagctctacagatgagtggctctttggcatttggtgctgtggcagatttgcaaacaagactttcccagcagactgaagcttcagctttagctgcagctgcctctgttcagccacttgcaacacaatgtttccaactctctaacatgtttaaccctcaaacagaagaagaagttggatgggataccgagattaaggatgatgtgattgaagaatgtaataaacatggaggagttattcatatttatgttgacaaaaattcagctcagggcaatgtgtatgtgaagtgcccatcaattgctgcagctattgctgctgtcaatgcattgcatggcaggtggtttgctggtaaaatgataacagcagcatatgtacctcttccaacttaccacaacctgtttcctgattctatgacagcaacacagctactggttccaagtagacgatgaaggaagatatagtcccttatgtatatagctttttttctttcttgagaattcatcttgagttatcttttatttagataaaaataaagaggcaaggatctactgtcatttgtatgcaatttcctgttaccttgaaaaaataaaaatgttaacaggaatgcagtgtgctcattctccctaaatagtaaatcccactgtatacaaaactgttctcttgttctgccttttaaaatgttcatgtagaaaattaatgaactataggaatagctctaggagaacaaatgtgctttctgtaaaaaggcagaccagggatgtaatgtttttaatgtttcagaagcctaactttttacacagtggttacatttcacatttcactaatgttgatatttggctgatggttgagcagtttctgaaatacacatttagtgtatggaaatacaagacagctaaagggctgtttggttagcatctcatcttgcattctgatcaattggcaagaaagggagatttcaaaattatatttcttgatggtatcttttcaattaatgtatctgtaaaagtttctttgtaaatactatgtgttctggtgtgtcttaaaattccaaacaaaatgatccctgcatttcctgaagatgtttaaacgtgagagtctggtaggcaaagcagtctgagaaagaaataggaaatgcagaaataggttttgtctggttgcatataatctttgctctttttaagctctgtgagctctgaaatatatttttgggttacttcagtgtgtttgacaagacagcttgatatttctatcaaacaaatgactttcatattgcaacaatctttgtaagaaccactcaaataaaagtctcttaaaaaggcc

SEQ ID NO: 2524 - protein, 524 aa, Homo sapiens
  ref <308>: DATABASE ACCESSION NUMBER: Refseq / NP_004893
  ref <309>: DATABASE ENTRY DATE: 2002-11-05
MADDIDIEAMLEAPYKKDENKLSSANGHEERSKKRKKSKSRSRSHERKRSKSKERKRSRDRERKKSKSRERKRSRSKERRRSRSRSRDRRFRGRYRSPYSGPKFNSAIRGKIGLPHSIKLSRRRSRSKSPFRKDKSPVREPIDNLTPEERDARTVFCMQLAARIRPRDLEEFFSTVGKVRDVRMISDRNSRRSKGIAYVEFVDVSSVPLAIGLTGQRVLGVPIIVQASQAEKNRAAAMANNLQKGSAGPMRLYVGSLHFNITEDMLRGIFEPFGRIESIQLMMDSETGRSKGYGFITFSDSECAKKALEQLNGFELAGRPMKVGHVTERTDASSASSFLDSDELERTGIDLGTTGRLQLMARLAEGTGLQIPPAAQQALQMSGSLAFGAVADLQTRLSQQTEASALAAAASVQPLATQCFQLSNMFNPQTEEEVGWDTEIKDDVIEECNKHGGVIHIYVDKNSAQGNVYVKCPSIAAAIAAVNALHGRWFAGKMITAAYVPLPTYHNLFPDSMTATQLLVPSRR

SEQ ID NO: 2525 - DNA, 1381 bp, Rattus norvegicus
  ref <308>: DATABASE ACCESSION NUMBER: Refseq / NM_019144
  ref <309>: DATABASE ENTRY DATE: 2002-11-14
ccccagagaataaagtctcagcgatcaccgcttctgttccaggagcttccttgcctcttgcgtcctctatgaccacctgtgcttcctccagcatggatacgtggatggtgctgctgggcctgcaaatcctgctgctcccactcctggctcactgtacagccccagcttccaccctgagattcgtggctgtgggtgactggggaggggtccccaatgccccattccacacagcccgggaaatggccaatgctaaagaaatcgccagaaccgtgcagattatgggcgctgacttcatcatgtccctgggggacaacttctacttcactggagtgcatgacgccaatgacaagaggttccaggagacctttgaggatgtgttctctgaccgtgccctccgcaacatcccctggtacgtgctggctggaaaccatgatcaccttggcaatgtctcggcacaaattgcctactccaagatctccaagcgctggaacttccccagcccttattaccgtttgcgtttcaaagttccgcggtcgaacatcaccgtggccatctttatgctggacaccgtgatgctgtgtggcaattccgacgactttgtcagccagcagcctgaaatgccccgagacctgggagtggcccgcactcagctgtcctggctcaaaaaacagttggcagcagccaaggaggactatgttttggtggccggtcactaccccatctggtccatcgccgagcacggacccacccgctgcctggtcaagaacttgaggccattgttggctgcatacggggtcaccgcctacctgtgtgggcatgaccacaacctgcagtatcttcaggatgagaacggtgtgggctatgtgctgagtggggccggcaacttcatggacccttctgtgcggcatcaacgaaaggtccccaacggctacctacgctttcactatggatctgaggactctctgggtggcttcacatacgtggagataggctccaaagaaatgagcatcacgtatgtggaagcctctggaaaatcactcttcaagaccagcctccccaggcgacccagaccctgaagacctacaagggtcctgcttatcccctaatgggtctgagggagggagcctctgcaagcctgatgggtgggccctgtgaggacctcacccaccggcagctttttctctgccctggtactctggcagagtgggaagggggaaccacagaggcttacatataggaaagaagtacactcacaccaactggcccccacagccaggcttaccctgtggttttggggtagacctttcttgggagtggggctttcttttaaatcaagcatctcactgtcactgctgttcaataaaaacaatagttgacaagg

SEQ ID NO: 2526 - protein, 327 aa, Rattus norvegicus
  ref <308>: DATABASE ACCESSION NUMBER: Refseq / NP_062017
  ref <309>: DATABASE ENTRY DATE: 2002-11-14
MDTWMVLLGLQILLLPLLAHCTAPASTLRFVAVGDWGGVPNAPFHTAREMANAKEIARTVQIMGADFIMSLGDNFYFTGVHDANDKRFQETFEDVFSDRALRNIPWYVLAGNHDHLGNVSAQIAYSKISKRWNFPSPYYRLRFKVPRSNITVAIFMLDTVMLCGNSDDFVSQQPEMPRDLGVARTQLSWLKKQLAAAKEDYVLVAGHYPIWSIAEHGPTRCLVKNLRPLLAAYGVTAYLCGHDHNLQYLQDENGVGYVLSGAGNFMDPSVRHQRKVPNGYLRFHYGSEDSLGGFTYVEIGSKEMSITYVEASGKSLFKTSLPRRPRP

SEQ ID NO: 2527 - DNA, 625 bp, Rattus norvegicus
  misc_feature (1)..(625): n=a, c, g or t
  ref <308>: DATABASE ACCESSION NUMBER: EMBL / AI177052
  ref <309>: DATABASE ENTRY DATE: 1999-01-22
tctctgccttctgnaggctgtttaggattggacaagtttaaaaaaccagagggaagctgggactgtgaagtatgcctagtgcaaaataaagcggactctaccaagtgcatagcttgtgaaagtgcaaagccaggcacaaagtctgagtttaaaggctttgggacatcttcatctttaaatccagcaccctcagccttcaaatttggtattccatcatcatcttctgggctttctcaaacttttacaagcactggaaattttaaatttggagatcagggaggattcaaattaggcacttcatctgactctgggtctacaaacaccatgaatacaaactttaaatttcctaaaccaactggagattttaaatttggagtattacctgattccaaacctgaagaaataaaaaacgacagcaagaatgataattttcagtttggaccttcttctggcttaagcaatccagcgtcttcagctccatttcagtttggggtatctactctcgggcagcaggaaaagaaagaggagctgcctcagtcttcatctgcaggcttcagttttggtgcaggtgttgctaacccctctagtgctgctattgacaccacagtgacctcagagaacaaga

SEQ ID NO: 2528 - DNA, 355 bp, Rattus norvegicus; identical to SEQ ID NO: 2082
  ref <308>: DATABASE ACCESSION NUMBER: EMBL / AA893905
  ref <309>: DATABASE ENTRY DATE: 2000-03-03

SEQ ID NO: 2529 - DNA, 541 bp, Homo sapiens; identical to SEQ ID NO: 2083
  ref <308>: DATABASE ACCESSION NUMBER: Refseq / NM_024839
  ref <309>: DATABASE ENTRY DATE: 2002-12-23

SEQ ID NO: 2530 - protein, 154 aa, Homo sapiens; identical to SEQ ID NO: 2084
  ref <308>: DATABASE ACCESSION NUMBER: Refseq / NP_079115
  ref <309>: DATABASE ENTRY DATE: 2002-12-23

SEQ ID NO: 2531 - DNA, 2547 bp, Rattus norvegicus
  ref <308>: DATABASE ACCESSION NUMBER: Refseq / NM_022855
  ref <309>: DATABASE ENTRY DATE: 2003-01-13
cggtcttgccttaagaataaatagataaggggttggggatttagctcagtggtagagcgcttgcctcgtaagcgcaaggccctgggttcagtcctcagctccgcgccggccggagagactagacgctttcctttctttttcaccccctcttttctttcgttcttttttttttttttccccctcctctcatgtattcacttccgggtccggtgccgcttccggatgctcgaggccgaaggatgtttgacctccggataagcgaggcgccgccgtgcattcattcccggttgcatcggtggccacagccgcggcccggacggcgactccgctctcagcggcggcagtaaggaggagccggcggcggcgcgctgagccagtagacgcgggcccgtccttccctcgctcgcgccttccttcctcggcctcgttcatcttcagcggccggcggcggggatgtgccggcgctgacgggcggacgcgcgccgggccgagccgctgcccgcggccgcgcctctgagctctctatcggcaccagcttatatcaccgagaagataattgtaaaggcataccttgttgagaacataactgagaggttgtacggatgggatgaacacgcgtcagttgcctgcctgtctgctggagtttggatgctagcgttgctcatagggaactgctgcctagggatgcacctgctctacagtaccccatttcatcgtgcttgtctcgattaaagaattcaaagtggagtaccgcaaacttgatatggataataaaaagaaagacaaggacaaatcagatgacagaatggcacggcccagtggtcggtcagggcacagcactcgaggaactgggtcttcttcatctggagttttaatggttggacctaactttagagttgggaaaaaaattggatgtggcaattttggagaattacgattagggaaaaatttatatacaaatgaatatgtggcgattaaactggagcccatgaaatccagagcaccacagctgcatttggaatacagattctataagcagttaggatctggagatggtatacctcaagtttactattttggcccttgtggtaaatacaacgctatggtgctggaactgctgggacctagtttggaagatttgtttgacctctgtgatagaacattttctcttaaaaccgttctcatgatagctatacagctgatttctcgcatggagtatgtccactcaaagaacttgatatacagagatgtgaagcccgagaatttcttaataggacggccaggaaacaaagcccagcaagtcattcacatcatagattttggtttggcaaaggaatatattgatccagagacaaagaaacatataccatacagagaacacaaaagccttactggaacagccagatacatgagcataaacacacatctaggaaaagaacagagcagaagagacgatttagaagctttaggacatatgttcatgtatttcctgagaggcagtcttccttggcaaggcctaaaggcagatacattaaaagagagatatcagaaaattggagacacaaaacgagccacaccgatagaagtgctgtgtgaaaacttcccagaagaaatggcaacatatcttcgttacgtacgaaggctagatttttttgaaaagccagactatgattacttaagaaagctttttactgacttgtttgatcgcaaagggtatatgtttgattatgaatatgactggattggtaaacagttgcctactcctgtaggtgcagttcagcaagacccggctctgtcatcgaacagagaagcacaccaacacagagacaagatacagcagtctaaaaaccagtcggcagaccacagggcagcttgggactcccagcaggcaaatccccaccatttgagagctcaccttgcagcagacagacatggtggctcggtacaggttgtaagttctacaaatggagagctaaacacggatgaccccacggcgggacggtcaaatgcacccattacagcccctacggaagtagaagtgatggatgaaaccaagtgctgctgctttttcaaacgaaggaaaaggaaaaccatacaacgtcacaagtgactggacacagacagagcctggggagttacttacatgtttatatgctgtctcgtgattaaaatcatctctagagtgaccacatatattttcaaggactcactcttgaaacaaaaaagtcatactttcatatttcattttgtggttgtcttatattcattcccccaccccggaattccttagacccttctgcccctgctagcgcttccaccagctctcctccgctccccgctcctgcagcccagcctccttgtgtgcaagaactgtcagggagatctgctggcagttccagtccggaagccggagaagactctgatcatgaggatggaaactattgccctcctgtcaagcgcgagcggacatcatctctaacgcattcagaggagaagagcagcggcttccggctgaagcccccaacgcttatccacgctgctgttccg

SEQ ID NO: 2532 - protein, 448 aa, Rattus norvegicus
  ref <308>: DATABASE ACCESSION NUMBER: Refseq / NP_074046
  ref <309>: DATABASE ENTRY DATE: 2003-01-13
MDNKKKDKDKSDDRMARPSGRSGHSTRGTGSSSSGVLMVGPNFRVGKKIGCGNFGELRLGKNLYTNEYVAIKLEPMKSRAPQLHLEYRFYKQLGSGDGIPQVYYFGPCGKYNAMVLELLGPSLEDLFDLCDRTFSLKTVLMIAIQLISRMEYVHSKNLIYRDVKPENFLIGRPGNKAQQVIHIIDFGLAKEYIDPETKKHIPYREHKSLTGTARYMSINTHLGKEQSRRDDLEALGHMFMYFLRGSLPWQGLKADTLKERYQKIGDTKRATPIEVLCENFPEEMATYLRYVRRLDFFEKPDYDYLRKLFTDLFDRKGYMFDYEYDWIGKQLPTPVGAVQQDPALSSNREAHQHRDKIQQSKNQSADHRAAWDSQQANPHHLRAHLAADRHGGSVQVVSSTNGELNTDDPTAGRSNAPITAPTEVEVMDETKCCCFFKRRKRKTIQRHK

SEQ ID NO: 2533 - DNA, 1260 bp, Rattus norvegicus
  ref <308>: DATABASE ACCESSION NUMBER: Refseq / NM_053314
  ref <309>: DATABASE ENTRY DATE: 2003-01-13
atgagctattacggaagtagctaccggattgtcaacgtggactccaaatatccaggctatcctccagagcatgccatagccgagaagagaagagcgaggaggcgcctgctccacaaagatggcagctgtaacgtgtactttaaacacatttttggagaatgggggagctacatggttgatatattcaccactcttgtggataccaagtggcgccatatgtttgtagtattttctttgtcttacattctctcctggttgatattcggctccatattttggctcatagcccttcatcacggagacctattaagcgatccagacatcaccccgtgcgtggacaacgtgcattcatttacggctgcgtttttattctcccttgagacccaaaccaccatcgggtacggttaccgttgtgtcacggaagaatgctctgtggccgtgctgacggtcatccttcagtccatcctgagctgcatcataaacaccttcatcattggggcagccttggcaaagatggcgaccgcccggaagcgagcccagaccatccgcttcagctatttcgcactcatcggcatgagagacgggaagctttgcctcatgtggcgcataggtgacttccgaccgaaccatgtggtggagggcacggtgagagcccaacttctgcgctattcagaagacagcgaagggcggatgacgatggcgtttaaagacctcaaactcgtcaatgaccagataatcctggtaacgccagtgaccattgtccatgaaattgaccacgagagtcctctgtatgcccttgaccgcaaggcagtggccaaagataatttcgagattctggtgacatttatttatactggtgactctactgggacatcccaccagtccagaagttcctacgtccccagagaaattctctggggacacaggtttcatgatgtattggaagtgaagagaaagtactacaaggtaaactgcttgcagtttgagggaagcgtggaagtctacgcccccttttgcagtgccaaacaactggactggaaggaccaacagctcaacaacttggagaaaacgtcccctgcccgaggatcctgcacctcggacaccaacaccaggaggagatccttcagcgcagttgccatggtgagcagctgtgagaacccagaggagaccagcctgtccccacaagatgagtgtaaggaggtcccctatcagaaagccctcctgactttaaacaggatctccatggaatcccagatgtag

SEQ ID NO: 2534 - protein, 419 aa, Rattus norvegicus
  ref <308>: DATABASE ACCESSION NUMBER: Refseq / NP_445766
  ref <309>: DATABASE ENTRY DATE: 2003-01-13
MSYYGSSYRIVNVDSKYPGYPPEHAIAEKRRARRRLLHKDGSCNVYFKHIFGEWGSYMVDIFTTLVDTKWRHMFVVFSLSYILSWLIFGSIFWLIALHHGDLLSDPDITPCVDNVHSFTAAFLFSLETQTTIGYGYRCVTEECSVAVLTVILQSILSCIINTFIIGAALAKMATARKRAQTIRFSYFALIGMRDGKLCLMWRIGDFRPNHVVEGTVRAQLLRYSEDSEGRMTMAFKDLKLVNDQIILVTPVTIVHEIDHESPLYALDRKAVAKDNFEILVTFIYTGDSTGTSHQSRSSYVPREILWGHRFHDVLEVKRKYYKVNCLQFEGSVEVYAPFCSAKQLDWKDQQLNNLEKTSPARGSCTSDTNTRRRSFSAVAMVSSCENPEETSLSPQDECKEVPYQKALLTLNRISMESQM

SEQ ID NO: 2535 - DNA, 4021 bp, Homo sapiens
  ref <308>: DATABASE ACCESSION NUMBER: Refseq / NM_018658
  ref <309>: DATABASE ENTRY DATE: 2002-11-27
tgtctggagcttttctttcctttattattaactaaagagcattctctaccattgcccagctgaaagcacctagctcatagattctctgtggggagagtgaataaagaatgggggattgaggcacagagtgttaaaatagtgagacacaggattctaactggcagactggcactttatctcaattcttaactgctgtgttgcctctcactttaaagacatccacattccaccctgggccttgcccgtctggtgagcccaatctctgctggtcagtcacgcagttgaggtcagggaaggagtaactcaagatgattttgatgttgcagttttaaatttcactttgacttgagctgggaaatcctttggcctattataccatggatgctaaaaatggttctaactgaaaacccaaaccaagaaatagcaacaagtctagaattcttactactacaaaactcacctggatccctaagggcacagcaaagaatgagctattacggcagcagctatcatattatcaatgcggacgcaaaatacccaggctacccgccagagcacattatagctgagaagagaagagcaagaagacgattacttcacaaagatggcagctgtaatgtctacttcaagcacatttttggagaatggggaagctatgtggttgacatcttcaccactcttgtggacaccaagtggcgccatatgtttgtgatattttctttatcttatattctctcgtggttgatatttggctctgtcttttggctcatagcctttcatcatggcgatctattaaatgatccagacatcacaccttgtgttgacaacgtccattctttcacaggggcctttttgttctccctagagacccaaaccaccataggatatggttatcgctgtgttactgaagaatgttctgtggccgtgctcatggtgatcctccagtccatcttaagttgcatcataaatacctttatcattggagctgccttggccaaaatggcaactgctcgaaagagagcccaaaccattcgtttcagctactttgcacttataggtatgagagatgggaagctttgcctcatgtggcgcattggtgattttcggccaaaccacgtggtagaaggaacagttagagcccaacttctccgctatacagaagacagtgaagggaggatgacgatggcatttaaagacctcaaattagtcaacgaccaaatcatcctggtcaccccggtaactattgtccatgaaattgaccatgagagccctctgtatgcccttgaccgcaaagcagtagccaaagataactttgagattttggtgacatttatctatactggtgattccactggaacatctcaccaatctagaagctcctatgttccccgagaaattctctggggccataggtttaatgatgtcttggaagttaagaggaagtattacaaagtgaactgcttacagtttgaaggaagtgtggaagtatatgcccccttttgcagtgccaagcaattggactggaaagaccagcagctccacatagaaaaagcaccaccagttcgagaatcctgcacgtcggacaccaaggcgagacgaaggtcatttagtgcagttgccattgtcagcagctgtgaaaaccctgaggagaccaccacttccgccacacatgaatatagggaaacaccttatcagaaagctctcctgactttaaacagaatctctgtagaatcccaaatgtagtcctaaattgcaattatgagggctaccactgaatcattttatctttcagccaatcaagtcgttgtaaacgtggcttttttgaaagtgttatggctatgttttatgatgatgctgggtaagtagagtaagttaaacttggtaaaagataatctaaaaattccatagttctcagttattaaaatttttcttgttcgccaattttgtattaagaatgctattaagcctaattgattaaaatttatcttttttattatcttacatgcttgtatcttcagttggaggtgtagtattcaaaaacggggaatgaaggcaggaaggaggctggaataaataaaaataaaaatagacaagtaagacagcataaataatacatttttaaacatgtcaacattgataatacaatgaagatttaccataaaaagtatcatatctaaccaagatatgcaaaagatgcattcagtaagctgtaacgttgagaaatgtaactgtgaaatcagctcaccagttcaagtcactaggtttgccacttggaccgtcttggtttcagcgagcatagcgagtggctgtaagaaattgtccatgccaccaattccactgctacttgcccaggtagtgatcagtgagagttagaagcaattttttctctaaccgatgaggcagaagaaaagttaacagtatttaaagcagcatttctctcttaacgttcctgggagactccaacaaatggagaccagaaacaaggcaaccacgaccttgctaggttctctgaggaggggactttctatgttcacgtcccaccttcttcgaggacatgaccaagggacaggatcatacagatgaggtgaggggatggttagcagcgataaacattctcagacccttggagagaaaccgttgctagcttgctggtcccgaaagattgcaactttggctgctacagaaaggatagaacctttttggggggagggtggggagggagatatttatttgtgcccagaagcagttatgtatgcttcttgtcttggttactgtacaagatacaaatgactcgagttgtggattgcaagaaactcttttattaaacttggaacaaccatttaaatgaaggattttgtgagatagaattcaattaaagcgatttgaatgcacagtaagtggataatctgagtacaatgaaatttcttaagttttagaacatgagataaagttgtatactctactttcatgttaaaatgttaatcatgattactttaagcccacatccactgagtaaagagtcactttaaactttataaatcaaagagatattaggaacattcagaattatttgtgttttgtttttgttttacattgttgctgcactggcaataagtatgtggcactgtttttatttgtttatgttatttaaatacacacccagacacacacacacacagtttttgctttttctggaaaatctttctttctcttctctctccatgaaaattaaaacacacaagtgaatgaagtaattacatagtccaagattagaaatacaagtaaaatatataggtataggtagatagagtgcctttctgtttcttttcttttcttttttctttttttgttcttccttcctttcttccctcctccccctcatccttccctttctccttcttttcccttttttttttttttttgacctgggagtaataaagttactttttaaatgcacgtatgcaatcttttattcctcttgttttatggataagagatttgttcaggtcaaaagttgcaaaactgttctgaagcttaatattagagacccaagtaagattgtttttagtcttgcttgaggaatgcacactccatttaaaaaattgtgcgctctgtagatttggattttacagcagcaattacttggctaaattagagtactgcaatcttgtaagtagaaaacagccaccatgacaataaacaaaaacacttaaaaatatttttagcttgttttacctacatctagtttcatttcatcttgctttgctttgttgactctgctaccgctgatgtttgccttgtcaatatcagaataggggcatcagtgtcccgtgaaatacattttgttgtgctatgagcctctgtaatcaaatgcttgtactcagaagagagtgtaaaatcagcatttctatgtaacatatatctctaattatctgtgtaattttataacatactttgacaaccccagtgagttacttaataataaagatcttaaaataatgcaaaaaaaaaaaaaaaaaaa

SEQ ID NO: 2536 - protein, 418 aa, Homo sapiens
  ref <308>: DATABASE ACCESSION NUMBER: Refseq / NP_061128
  ref <309>: DATABASE ENTRY DATE: 2002-11-27
MSYYGSSYHIINADAKYPGYPPEHIIAEKRRARRRLLHKDGSCNVYFKHIFGEWGSYVVDIFTTLVDTKWRHMFVIFSLSYILSWLIFGSVFWLIAFHHGDLLNDPDITPCVDNVHSFTGAFLFSLETQTTIGYGYRCVTEECSVAVLMVILQSILSCIINTFIIGAALAKMATARKRAQTIRFSYFALIGMRDGKLCLMWRIGDFRPNHVVEGTVRAQLLRYTEDSEGRMTMAFKDLKLVNDQIILVTPVTIVHEIDHESPLYALDRKAVAKDNFEILVTFIYTGDSTGTSHQSRSSYVPREILWGHRFNDVLEVKRKYYKVNCLQFEGSVEVYAPFCSAKQLDWKDQQLHIEKAPPVRESCTSDTKARRRSFSAVAIVSSCENPEETTTSATHEYRETPYQKALLTLNRISVESQM

SEQ ID NO: 2537 - DNA, 2207 bp, Rattus norvegicus
  ref <308>: DATABASE ACCESSION NUMBER: Refseq / NM_053648
  ref <309>: DATABASE ENTRY DATE: 2003-01-13
cattttagaggcactatttctagtacaatgggtatgaagctgtgatttgagccgcaaatttcagagcattggccatagaacagacctggtcggtttgatgtcactgtagcttggtttaggcggccggggattgcgtcggtttttaaccctagtgaagggacggctcatgagtgcaggacgtcttcggatgagattagtatacgaattggaagttctattggtaagactacccgattatcaacttctaatagacgaagctcacctggttttaggtcgggacagatggaggcatcaaggagcagagggcaggaagacaggacgctttgagcacacggggctttgtgtctattccactgacaacctcctcactgccacccaccggttccatggagataatatttggccggaataagaaagaacagctggagccattacgggccacagtgacaggcagcattccagcatggctgcaggggaccctgctccgaaacgggcctgggatgcacacagtgggagacagcaagtacaaccattggtttgatggcctggcccttctccacagtttctccatcagagatggggaggtcttctacaggagcaaatacctgcagagcgacacctacaacgccaacatcgaggccaatagaatcgtggtgtctgagttcggaacaatggcctacccagacccctgcaaaaacatcttttccaaagctttctcctacttgtcccacaccatccccgacttcacagacaactgcctgattaacatcatgaaatgtggagaagacttctatgccaccacagagaccaactacatcaggaaaatcgacccccagactctagagaccttggagaaggttgattaccggaagtatgtggctgtaaacctggctacctcacaccctcattacgacgaggctggaaatgtccttaacatgggtacctccatcgcggacaaaggagggacaaaatacgtgatgtttaagatccccgccacagcaccaggcagcaagaagaaagggaagaaccccttgaagcactcagaagttttctgctccatcccgtcccgctcgctgctctcccccagttactaccacagctttggagtcacggagaactatgtggtgtttctggagcagccttttaagctggatatcctcaagatggccaccgcatacatgaggggtgtgagctgggcttcctgtatgacattctgcaaggaggacaagacttacattcatatcatcgaccagaagaccagaaagcctgtgccaaccaaattctacacagaccccatggtggtcttccaccatgttaatgcctatgaggaggacggctgtgtgctgtttgatgtcatcgcctatgaggacaacagtctctatcagctcttctacctggccaacctgaacaaggacttcgaggagaagtccaggctgacctcagtgcctaccctcaggaggtttgctgtgcccctccacgtggacaaggatgcagaagtgggctcgaatttagtcaaggtgtcatctacaacagcaactgccctgaaggagaaggacgaccatgtctactgccagcctgaggtcctctacgaaggcctagagctccctcggataaattatgctcacaacgggaagccatatcgctacatctttgctgctgaagtacaatggagtccagtcccaaccaagatactaaaatatgacgttctcaccaagtcctccttaaagtggtccgaggagagctgctggcctgcagagcctctgtttgtccccacaccgggtgcgaaggatgaggatgatggagtcatcttatcagccatcatctctacagatccccaaaagctgccctttttacttattctggatgcgaaaagttttacggaattggctcgcgcctctgttgatgtggacatgcacctggacctgcatggtttatttattccggatgcaggctggaatgcagtgaagcagactccagccaaaacgcaagaggatgaaaattcagatcatcccacaggtctgacagcaccaggattgggccatggtgaaaatgacttcacggcaggtcatggcggcaagagcctttaatcctagcactcgaggcagaggcaagcagatctctgagttcaaggccagcctggtctacaacacaagttccaggacagccagggatacacagagaaatcctatcttgaaaacaaagcaaag

SEQ ID NO: 2538 - protein, 566 aa, Rattus norvegicus
  ref <308>: DATABASE ACCESSION NUMBER: Refseq / NP_446100
  ref <309>: DATABASE ENTRY DATE: 2003-01-13
MEIIFGRNKKEQLEPLRATVTGSIPAWLQGTLLRNGPGMHTVGDSKYNHWFDGLALLHSFSIRDGEVFYRSKYLQSDTYNANIEANRIVVSEFGTMAYPDPCKNIFSKAFSYLSHTIPDFTDNCLINIMKCGEDFYATTETNYIRKIDPQTLETLEKVDYRKYVAVNLATSHPHYDEAGNVLNMGTSIADKGGTKYVMFKIPATAPGSKKKGKNPLKHSEVFCSIPSRSLLSPSYYHSFGVTENYVVFLEQPFKLDILKMATAYMRGVSWASCMTFCKEDKTYIHIIDQKTRKPVPTKFYTDPMVVFHHVNAYEEDGCVLFDVIAYEDNSLYQLFYLANLNKDFEEKSRLTSVPTLRRFAVPLHVDKDAEVGSNLVKVSSTTATALKEKDDHVYCQPEVLYEGLELPRINYAHNGKPYRYIFAAEVQWSPVPTKILKYDVLTKSSLKWSEESCWPAEPLFVPTPGAKDEDDGVILSAIISTDPQKLPFLLILDAKSFTELARASVDVDMHLDLHGLFIPDAGWNAVKQTPAKTQEDENSDHPTGLTAPGLGHGENDFTAGHGGKSL

SEQ ID NO: 2539 - DNA, 2201 bp, Homo sapiens
  ref <308>: DATABASE ACCESSION NUMBER: Refseq / NM_005520
  ref <309>: DATABASE ENTRY DATE: 2001-05-17
ttttttttttcgtcttagccacgcagaagtcgcgtgtctagtttgtttcgacgccggaccgcgtaagagacgatgatgttgggcacggaaggtggagagggattcgtggtgaaggtccggggcttgccctggtcttgctcggccgatgaagtgcagaggtttttttctgactgcaaaattcaaaatggggctcaaggtattcgtttcatctacaccagagaaggcagaccaagtggcgaggcttttgttgaacttgaatcagaagatgaagtcaaattggccctgaaaaaagacagagaaactatgggacacagatatgttgaagtattcaagtcaaacaacgttgaaatggattgggtgttgaagcatactggtccaaatagtcctgacacggccaatgatggctttgtacggcttagaggacttccctttggatgtagcaaggaagaaattgttcagttcttctcagggttggaaatcgtgccaaatgggataacattgccggtggacttccaggggaggagtacgggggaggccttcgtgcagtttgcttcacaggaaatagctgaaaaggctctaaagaaacacaaggaaagaatagggcacaggtatattgaaatctttaagagcagtagagctgaagttagaactcattatgatccaccacgaaagcttatggccatgcagcggccaggtccttatgacagacctggggctggtagagggtataacagcattggcagaggagctggctttgagaggatgaggcgtggtgcttatggtggaggctatggaggctatgatgattacaatggctataatgatggctatggatttgggtcagatagatttggaagagacctcaattactgtttttcaggaatgtctgatcacagatacggggatggtggctctactttccagagcacaacaggacactgtgtacacatgcggggattaccttacagagctactgagaatgacatttataattttttttcaccgctcaaccctgtgagagtacacattgaaattggtcctgatggcagagtaactggtgaagcagatgtcgagttcgcaactcatgaagatgctgtggcagctatgtcaaaagacaaagcaaatatgcaacacagatatgtagaactcttcttgaattctacagcaggagcaagcggtggtgcttacgaacacagatatgtagaactcttcttgaattctacagcaggagcaagcggtggtgcttatggtagccaaatgatgggaggcatgggcttgtcaaaccagtccagctacgggggcccagccagccagcagctgagtgggggttacggaggcggctacggtggccagagcagcatgagtggatacgaccaagttttacaggaaaactccagtgattttcaatcaaacattgcataggtaaccaaggagcagtgaacagcagctactacagtagtggaagccgtgcatctatgggcgtgaacggaatgggagggttgtctagcatgtccagtatgagtggtggatggggaatgtaattgatcgatcctgatcactgactcttggtcaacctttttttttttttttttttctttaagaaaacttcagtttaacagtttctgcaatacaagcttgtgatttatgcttactctaagtggaaatcaggattgttatgaagacttaaggcccagtatttttgaatacaatactcatctaggatgtaacagtgaagctgagtaaactataactgttaaacttaagttccagcttttctcaagttagttataggatgtacttaagcagtaagcgtatttaggtaaaagcagttgaattatgttaaatgttgccctttgccacgttaaattgaacactgttttggatgcatgttgaaagacatgcttttattttttttgtaaaacaatataggagctgtgtctactattaaaagtgaaacattttggcatgtttgttaattctagtttcatttaataacctgtaaggcacgtaagtttaagctttttttttttttaagttaatgggaaaaatttgagacgcaataccaatacttaggattttggtcttggtgtttgtatgaaattctgaggccttgatttaaatctttcattgtattgtgatttccttttaggtatattgcgctaagtgaaacttgtcaaataaatcctccttttaaaaactgc

SEQ ID NO: 2540 - protein, 449 aa, Homo sapiens
  ref <308>: DATABASE ACCESSION NUMBER: Refseq / NP_005511
  ref <309>: DATABASE ENTRY DATE: 2001-05-17
MMLGTEGGEGFVVKVRGLPWSCSADEVQRFFSDCKIQNGAQGIRFIYTREGRPSGEAFVELESEDEVKLALKKDRETMGHRYVEVFKSNNVEMDWVLKHTGPNSPDTANDGFVRLRGLPFGCSKEEIVQFFSGLEIVPNGITLPVDFQGRSTGEAFVQFASQEIAEKALKKHKERIGHRYIEIFKSSRAEVRTHYDPPRKLMAMQRPGPYDRPGAGRGYNSIGRGAGFERMRRGAYGGGYGGYDDYNGYNDGYGFGSDRFGRDLNYCFSGMSDHRYGDGGSTFQSTTGHCVHMRGLPYRATENDIYNFFSPLNPVRVHIEIGPDGRVTGEADVEFATHEDAVAAMSKDKANMQHRYVELFLNSTAGASGGAYEHRYVELFLNSTAGASGGAYGSQMMGGMGLSNQSSYGGPASQQLSGGYGGGYGGQSSMSGYDQVLQENSSDFQSNIA

SEQ ID NO: 2541 - DNA, 964 bp, Rattus norvegicus
  ref <308>: DATABASE ACCESSION NUMBER: Refseq / NM_022687
  ref <309>: DATABASE ENTRY DATE: 2003-01-13
gtggatgcaggccctgcttgcaactggctttgagcaaccacaggcagaaaattgctacattgtcctgacattagggcgactaattcagcatcccagcgtggccagagcgtgaagggagcagaaaagcatcactggccagcatcctcgcctcagcatctttatcaggcctcaggacacctagcgccccaccatcatcatttaggatggaccccagctcacacagctccctgccataacggaggaccaccagaagaatgttggatctccaagcctctgatggagaagaagcgtcgtgcccgcatcaacctgtcactggagcagctaaggtctcttctggagagacactactcccaccagatacggaagcgaaagctggagaaggccgatatcctggagctgagcgttaagtacgtgagaagcctccagaactcattgcaaggactttggctagtacccagtggggtggactacccgtccggattccgaggcggcttgccgggctccagccagaggcttcggcccggagaggacgacagcggcctgcgctgccccctgcttctccagcgcagggcaggcagcaccacggacagcgccaacccacagacggcctctgttctcagcccctgcctcccggccatctgggcccctggtccccctgcaggtggctcccaatccccgcagtccccgttccctccccttggaggtctccttgagtcctccactggcattctggcaccgccacctgcatcaaactgccaggccgagaatccgagacccgggtttcgcgtgtggcggccctggtgaggcctaggcaagaatttagattcaagccctaacctctgcccttatcacctcgccgtctagtttgggggaaactatttggggacacccatggtgactgcagggactctatcaatcggtggcctggtggggctgcagggaaatacacggagccatttgctga

SEQ ID NO: 2542 - protein, 175 aa, Rattus norvegicus
  ref <308>: DATABASE ACCESSION NUMBER: Refseq / NP_073178
  ref <309>: DATABASE ENTRY DATE: 2003-01-13
MEKKRRARINLSLEQLRSLLERHYSHQIRKRKLEKADILELSVKYVRSLQNSLQGLWLVPSGVDYPSGFRGGLPGSSQRLRPGEDDSGLRCPLLLQRRAGSTTDSANPQTASVLSPCLPAIWAPGPPAGGSQSPQSPFPPLGGLLESSTGILAPPPASNCQAENPRPGFRVWRPW

SEQ ID NO: 2543 - DNA, 425 bp, Rattus norvegicus
  ref <308>: DATABASE ACCESSION NUMBER: EMBL / AA859519
  ref <309>: DATABASE ENTRY DATE: 2000-03-03
tttttttttttttttttacagtgtaaaagagtaaaacacattttattatatatttttttttctttgaggaaaacagatgtgtgatagaggctgttatgaagtcttgaagggatcaaaactgggcaaggtgttttcaagccagcaagctccagttttgcagaacagctggatgacagtcgccaccagtgaagaccgcattaatacccacaagacagattgcagccgccatcacacacccgagacacagcctcagcagaactgccgggacttccagccctgggaagtaacctcggacggagggagccatcgcatctgggcatgcagtgaagcgggataggtgaaagcggcaggaggaggaagagcatgcgctaactccgctgggtacagagggtacggggcccacacttcacggctactggggtaaa

SEQ ID NO: 2544 - DNA, 1594 bp, Homo sapiens
  ref <308>: DATABASE ACCESSION NUMBER: Refseq / NM_006867
  ref <309>: DATABASE ENTRY DATE: 2003-02-26
atcccggacttcccagagcctgcctggagcgcgtactcagcggctctcgggtcccagcgtcccagccgcggcccgcgctcctccgccccgctcctcctcctcctcttcctcctcctcctcctctctaggcacccccgtcccctccttccagcggctgcagcccccagccccaactctccgcgcttactcctgggacgcgcgtcctcgccccatcctttgcttccttccttccttccttcttccttcctcccctggctcccgccctccctctccaggtcgccctcccggggcccgattgtctcggttccccgctgccggcccgcgccctgccccgtctctcccttgcacttcctgagtcgcccgccgccgccgtcgcagactcgccgcgggagccccagcccaacccgagcccgacagccactgccccggctccagctccagccccacagcccgcggcgcccgcccgagggagccccggcgcccggggaaggctccagtgggctagcgcgccctcgcccagccccgcgccccagccctgcccggcccggcgaggaaggaccgggaagatgaacaacggcggcaaagccgagaaggagaacaccccgagcgaggccaaccttcaggaggaggaggtccggaccctatttgtcagtggccttcctctggatatcaaacctcgggagctctatctgcttttcagaccatttaagggctatgagggttctcttataaagctcacatctaaacagcctgtaggttttgtcagttttgacagtcgctcagaagcagaggctgcaaagaatgctttgaatggcatccgcttcgatcctgaaattccgcaaacactacgactagagtttgctaaggcaaacacgaagatggccaagaacaaactcgtagggactccaaaccccagtactcctctgcccaacactgtacctcagttcattgccagagagccatatgagctcacagtgcctgcactttaccccagtagccctgaagtgtgggccccgtaccctctgtacccagcggagttagcgcctgctctacctcctcctgctttcacctatcccgcttcactgcatgcccagatgcgctggctccctccctccgaggctacttctcagggctggaagtcccgtcagttctgctgaatactatacccttcagcaatggctactagaaggacgaacaattgccctcctttggaagtacggctaatagaagccctagatccgaataagatccgaataagaatatgtaatggaccaggcgcagtgcctcacgcctgtcatcccagcactttgggaggctgaggcaggcggatcacttgatgacagaagtgtgagaccagcccagccaacatggtcccaggtgtgtgatggcggctgcaatctgtcttgtgggtattaatgcaatcttcagtggtggctactgttctctagctgttctacaaaactggagcatgctggcttgaaaaacccttgcccagtttggatcccttcaagactttgtcacagcctctatcacacatctgtttttctcgaagaaaaaaatataattaataaaaatgttttactcttttacactg

SEQ ID NO: 2545 - protein, 196 aa, Homo sapiens
  ref <308>: DATABASE ACCESSION NUMBER: Refseq / NP_006858
  ref <309>: DATABASE ENTRY DATE: 2003-02-26
MNNGGKAEKENTPSEANLQEEEVRTLFVSGLPLDIKPRELYLLFRPFKGYEGSLIKLTSKQPVGFVSFDSRSEAEAAKNALNGIRFDPEIPQTLRLEFAKANTKMAKNKLVGTPNPSTPLPNTVPQFIAREPYELTVPALYPSSPEVWAPYPLYPAELAPALPPPAFTYPASLHAQMRWLPPSEATSQGWKSRQFC

SEQ ID NO: 2546 - DNA, 691 bp, Rattus norvegicus
  ref <308>: DATABASE ACCESSION NUMBER: EMBL / U02534
  ref <309>: DATABASE ENTRY DATE: 2000-06-28
cagtaacacagacagtgcaggggccctgggcaccctcaggttctgtgtgtttgggctgggctccagagcatacccgcacttctgtgcctttgctcgagcggtggacacaaggctggaggagctgggcggggagcgactgttgcagctgggccagggtgatgagctctgcggccaggaggaggctttccgaggctgggcccaggcagccttccaggctgcctgtgaaactttctgtgtgggagaagatgccaaggctgctgcccgagatatcttcagtcccaagcgcagctggaaacgccagaggtaccggctgagtacccaagctgagagcctccaattactgccaaggctgactcacgtgcacagacggaagatgttccaggctacaattctttctgtggagaacctacagagcagcaaatccacccgagccacaatcctggtgcgtctggacactggaagccaggagggactgcagtaccagccaggggaccacataggtgtgtgcccacccaaccggcctggcctagtggaggcgctgctgagccgagtggaggaccctccgccatccacagagcctgtggccgtggaacaactggaaaaaggcagccctggtggccctccccccggctgggtacgggacccccggcttcccccaggtaccgtgcgccaggctctcacttacttcctg

SEQ ID NO: 2547 - DNA, 937 bp, Rattus norvegicus
  ref <308>: DATABASE ACCESSION NUMBER: Refseq / NM_024161
  ref <309>: DATABASE ENTRY DATE: 2003-01-13
ccgcgcggccgcctccgcggctcccggaacgcagaagctggtgtagggaggcgggcagtgaaggctccgaggcttgttcacattcggggaagcagaaaattgcctcatagttactaacctaacatggctgaccagaggcagcgctcactctctacttccggggaatcgttataccatgttcttggactggacaagaatgcaacctcagatgacattaaaaagtcctatcggaagctggccctgaaatatcaccctgacaagaaccctgataacccagaggctgcagacaagtttaaggagattaacaacgcccacgcaatcctgacagacgccacgaaaagaaacatttatgacaagtatggctcgctggggctctatgtggctgagcaatttggggaggagaatgtcaacacctacttcgtactctccagctggtgggccaaggcgctgttcgtcgtctgtggcctcctcacctgctgctactgctgctgctgtttatgctgttgctttaactgctgctgtgggaagtgcaagcccaaggcacctgagggtgaagagacagaattctacgtatcccctgaagacttggaggcacagctgcagtctgatgagagggaggctacagacacaccgatcgtcatacagccagcatccgccacagagaccacccagctgacagctgactcccaccccagctatcacaccgacgggttcaactaaattcaggagaggctgtgattagagggatgaatcagcatctggccactgcaaccttagaatcatgaactgtagtcactgaagatgggaaggcagccgtcaacctgacccgctgtggctggtcagggccactcccacctcctcttaagtccacccatctgtcaatccttgatacatgaagtgcgtagcatgcagtatttaaagcagtgtagctacggtc

SEQ ID NO: 2548 - protein, 198 aa, Rattus norvegicus
  ref <308>: DATABASE ACCESSION NUMBER: Refseq / NP_077075
  ref <309>: DATABASE ENTRY DATE: 2003-01-13
MADQRQRSLSTSGESLYHVLGLDKNATSDDIKKSYRKLALKYHPDKNPDNPEAADKFKEINNAHAILTDATKRNIYDKYGSLGLYVAEQFGEENVNTYFVLSSWWAKALFVVCGLLTCCYCCCCLCCCFNCCCGKCKPKAPEGEETEFYVSPEDLEAQLQSDEREATDTPIVIQPASATETTQLTADSHPSYHTDGFN

SEQ ID NO: 2549 - DNA, 442 bp, Rattus norvegicus
  ref <308>: DATABASE ACCESSION NUMBER: EMBL / AI639082
  ref <309>: DATABASE ENTRY DATE: 2000-03-04
cacgttctgattgagctcacccaggctggactgaaaggctccagtgaaggaagcgagagctatgaggaagatccttacctggtagtcaacccgaactacttgcttgaagattgagatatagaaggtgacttacggccaggaaccgggggtggcctaccttagccgggacctgggcagcactgagaccgtttctggagcgatgcttggggacagttgagaagagacagctgagttcatggccgtggatttcatgctggcacatgcgtgggcactttgtgcttgtcctgttgaagttggatcccaatcatgttttctgaaagactttttatttcatgtgtaggaaaagcctgctgcatttgtcatacatgtgactgcgggaattgctttttcctgtttccagccactgcttttactcgtgaaaataaagcaattgttctgtgaa

SEQ ID NO: 2550 - DNA, 3744 bp, Homo sapiens
  ref <308>: DATABASE ACCESSION NUMBER: Refseq / NM_005915
  ref <309>: DATABASE ENTRY DATE: 2002-11-05
ccacgcgtccggtggcggtcgagcgtggcgtaggcgaatcctcggcactaagcatatggacctcgcggcggcagcggagccgggcgccggcagccagcacctggaggtccgcgacgaggtggccgagaagtgccagaaactgttcctggacttcttggaggagtttcagagcagcgatggagaaattaaatacttgcaattagcagaggaactgattcgtcctgagagaaacacattggttgtgagttttgtggacctggaacaatttaaccagcaactttccaccaccattcaagaggagttctatagagtttacccttacctgtgtcgggccttgaaaacattcgtcaaagaccgtaaagagatccctcttgccaaggatttttatgttgcattccaagacctgcctaccagacacaagattcgagagctcacctcatccagaattggtttgctcactcgcatcagtgggcaggtggtgcggactcacccagttcacccagagcttgtgagcggaacttttctgtgcttggactgtcagacagtgatcagggatgtagaacagcagttcaaatacacacagccaaacatctgccgaaatccagtttgtgccaacaggaggagattcttactggatacaaataaatcaagatttgttgattttcaaaaggttcgtattcaagagacccaagctgagcttcctcgagggagtatcccccgcagtttagaagtaattttaagggctgaagctgtggaatcagctcaagctggtgacaagtgtgactttacagggacactgattgttgtgcctgacgtctccaagcttagcacaccaggagcacgtgcagaaactaattcccgtgtcagtggtgttgatggatatgagacagaaggcattcgaggactccgggcccttggtgttagggacctttcttataggctggtctttcttgcctgctgtgttgcgccaaccaacccaaggtttggggggaaagagctcagagatgaggaacagacagctgagagcattaagaaccaaatgactgtgaaagaatgggagaaagtgtttgagatgagtcaagataaaaatctataccacaatctttgtaccagcctgttccctactatacatggcaatgatgaagtaaaacggggtgtcctgctgatgctctttggtggcgttccaaagacaacaggagaagggacctctcttcgaggggacataaatgtttgcattgttggtgacccaagtacagctaagagccaatttctcaagcacgtggaggagttcagccccagagctgtctacaccagtggtaaagcgtccagtgctgctggcttaacagcagctgttgtgagagatgaagaatctcatgagtttgtcattgaggctggagctttgatgttggctgataatggtgtgtgttgtattgatgaatttgataagatggacgtgcgggatcaagttgctattcatgaagctatggaacagcagaccatatccatcactaaagcaggagtgaaggctactctgaacgcccggacgtccattttggcagcagcaaacccaatcagtggacactatgacagatcaaaatcattgaaacagaatataaatttgtcagctcccatcatgtcccgattcgatctcttctttatccttgtggatgaatgtaatgaggttacagattatgccattgccaggcgcatagtagatttgcattcaagaattgaggaatcaattgatcgtgtctattccctcgatgatatcagaagatatcttctctttgcaagacagtttaaacccaagatttccaaagagtcagaggacttcattgtggagcaatataaacatctccgccagagagatggttctggagtgaccaagtcttcatggaggattacagtgcgacagcttgagagcatgattcgtctctctgaagctatggctcggatgcactgctgtgatgaggtccaacctaaacatgtgaaggaagctttccggttactgaataaatcaatcatccgtgtggaaacacctgatgtcaatctagatcaagaggaagagatccagatggaggtagatgagggtgccggtggcatcaatggtcatgctgacagccctgctcctgtgaacgggatcaatggctacaatgaagacataaatcaagagtctgctcccaaagcctccttaaggctgggcttctctgagtactgccgaatctctaaccttattgtgcttcacctcagaaaggtggaagaagaagaggacgagtcagcattaaagaggagcgagcttgttaactggtacttgaaggaaatcgaatcagagatagactctgaagaagaacttataaataaaaaaagaatcatagagaaagttattcatcgactcacacactatgatcatgttctaattgagctcacccaggctggattgaaaggctccacagagggaagtgagagctatgaagaagatccctacttggtagttaaccctaactacttgctcgaagattgagatagtgaaagtaactgaccagagctgaggaactgtggcacagcacctcgtggcctggagcctggctggagctctgctagggacagaagtgtttctggaagtgatgcttccaggatttgttttcagaaacaagaattgagttgatggtcctatgtgtcacattcatcacaggtttcataccaacacaggcttcagcacttcctttggtgtgtttcctgtcccagtgaagttggaaccaaataatgtgtagtctctataaccaatacctttgttttcatgtgtaagaaaaggcccattacttttaaggtatgtgctgtcctattgagcaaataactttttttcaattgccagctactgcttttattcatcaaaataaaataacttgttctgaagttgtctattggatttctttctactgtaccctgattattacttccatctacttctgaatgtgagactttccctttttgcttaacctggagtgaagaggtagaactgtggtattatggatgaggtttctatgagaaggagtcattagagaactcatatgaaagctagaggccttagagatgactttccaaggttaattccagttttttttttttttaagtttataaaagtttattatacttttttaaaattactctttagtaatttattttacttctgtgtcctaagggtaatttctcaggattgttttcaaattgcttttttaggggaaataggtcatttgctatattacaagcaatccccaaattttatggtcttccaggaaaagttattaccgtttatgatactaacagttcctgagacttagctatgatcagtatgttcatgaggtggagcagttcctgtgttgcagcttttaacaacagatggcattcattaaatcacaaagtatgttaaaggtcacaaaagcaaaataactgtctgaggctaaggcccacgtgggacagtctaatacccatgagtactcaacttgccttgatgtctgagctttccagtgcaatgtgaatttgagcagccagaaatctattagtagaaagcaagacagattaatataggttaaaacaatgatttaaatatgtttctcccaataattatctctttccctggaatcaacttgtatgaaaccttgtcaaaatgtactccacaagtatgtacaattaagtattttaaaaataaatggcaaacattaaaaaaaaaaaaaaaaaaaaaaaaaa

SEQ ID NO: 2551 - protein, 821 aa, Homo sapiens
  ref <308>: DATABASE ACCESSION NUMBER: Refseq / NP_005906
  ref <309>: DATABASE ENTRY DATE: 2002-11-05
MDLAAAAEPGAGSQHLEVRDEVAEKCQKLFLDFLEEFQSSDGEIKYLQLAEELIRPERNTLVVSFVDLEQFNQQLSTTIQEEFYRVYPYLCRALKTFVKDRKEIPLAKDFYVAFQDLPTRHKIRELTSSRIGLLTRISGQVVRTHPVHPELVSGTFLCLDCQTVIRDVEQQFKYTQPNICRNPVCANRRRFLLDTNKSRFVDFQKVRIQETQAELPRGSIPRSLEVILRAEAVESAQAGDKCDFTGTLIVVPDVSKLSTPGARAETNSRVSGVDGYETEGIRGLRALGVRDLSYRLVFLACCVAPTNPRFGGKELRDEEQTAESIKNQMTVKEWEKVFEMSQDKNLYHNLCTSLFPTIHGNDEVKRGVLLMLFGGVPKTTGEGTSLRGDINVCIVGDPSTAKSQFLKHVEEFSPRAVYTSGKASSAAGLTAAVVRDEESHEFVIEAGALMLADNGVCCIDEFDKMDVRDQVAIHEAMEQQTISITKAGVKATLNARTSILAAANPISGHYDRSKSLKQNINLSAPIMSRFDLFFILVDECNEVTDYAIARRIVDLHSRIEESIDRVYSLDDIRRYLLFARQFKPKISKESEDFIVEQYKHLRQRDGSGVTKSSWRITVRQLESMIRLSEAMARMHCCDEVQPKHVKEAFRLLNKSIIRVETPDVNLDQEEEIQMEVDEGAGGINGHADSPAPVNGINGYNEDINQESAPKASLRLGFSEYCRISNLIVLHLRKVEEEEDESALKRSELVNWYLKEIESEIDSEEELINKKRIIEKVIHRLTHYDHVLIELTQAGLKGSTEGSESYEEDPYLVVNPNYLLED

SEQ ID NO: 2552 - DNA, 2280 bp, Rattus norvegicus
  ref <308>: DATABASE ACCESSION NUMBER: Refseq / NM_031984
  ref <309>: DATABASE ENTRY DATE: 2003-01-13
tgtaaatacagggctgaaagtgggagtggcgctccctcttcctgttatccccttggctcagcctcactgcctgatagaaatgtttctaatatggcacctggtcacagtccattgtagctgaactcccaggtcctgcactgtacaaccctcaccttcccagttcccttaccacctaataaagggcctgcctccggacagcgcccggcccgccgcgcccagctcagcctgctcagccctctggtcccgaggttccgctcagcgctctctcaaactagccgctgcaccatggcagaatcccacctgcagtcatctctgatcacagcctcacagttttttgagatctggcttcatttcgacgctgatggaagtggttacctggaaggaaaggagctgcagaacttgatccaggagcttctgcaggcacgaaagaaggctggattggagctatcacctgagatgaaaacctttgtggatcaatatgggcagagagatgatgggaaaataggaattgtagagttggcccatgtcttacccaccgaagagaatttcctgctgctctttcgatgccagcaactgaagtcctgcgaggaattcatgaagacttggagaaagtatgacactgaccacagtggcttcatagaaacggaggaacttaagaactttcttaaggacctgctagagaaagcaaacaagaccgtggatgatacgaaacttgctgagtacacagacctcatgctgaagctgttcgactcaaataatgatgggaagctggagctgacagagatggccaggttactaccagtgcaggaaaatttccttcttaaattccagggaatcaaaatgtgtgggaaagagttcaataaggcttttgagttatatgatcaggatggcaacggatacatagatgaaaatgagctggatgccttactgaaagacctgtgtgagaaaaacaaacaggaattggatattaacaatatttctacatacaagaagaacataatggccttgtcggatggagggaagctgtaccgaacagatcttgcccttattctctctgctggggacaactagagttggtggccacaaccacttgctagtgatacattgtatctaaaaccataactgtgcgctataaaggagtaggctgtattttcttttatatctgtaaattctactgcatatagagaattatccaggatgtgtggcacattcttttctgcttgtttctatactgtttgtaatgtacagtttttgtaagcatataattgaaaagaagaaagtctatgcttaggccagtcagtataatccattttcaaagatgaatctaacatgattctgctttcataaatacagatgaacacttggatttccctaaaactctaccatctcaacaattctagtgtcagatgtgtaaatgcacagctgtcagtgagtaaaagaataattcatgacaagccaagtgttttttaatttaggcaatcatagaactgtcccacaaagcacttctgtgcgttttccatctagtggaagggatgtgcttctgcttgtgaagcaccaaatgtcaatagttaactatggctttatcataaaacgatctccctagagatttaatttactgatcagtggcatgtctactgcttgaatagataccacactgttggttcaagctggcttggtggcaagggaaggtagccagatgacacataaatctgtctgatactatgcctatatttccaagaagtctattgcagagagtatgaccttagcccattttctaaattattttcatgtgttccagatgacaattattctagtaaactgctgttttgtgtcatattctgtgtgtactctctgattaaattcaatgtacctctgaggcctgtcgcagttgggctccggctcctttgcggagcaccatgtcgcagagggggaggagaccctgcagggcgcctgggtagaactgcacttcagcaatgggaatgggagcagcgttccagcttccgtctctatttataatggtgacatggaaaaaatactgctggatgcgcagatgaatctggacgaagcatctccaagagctctcactgtgacagcccacctcgctcccagacaccacaagataccaacaagagctgaaatagcaccacacgtttggtgagaaaaaacagcatgtgtgtctgaggaagattatattgagagaagaagagaagttgaaagtatcctgaagaaaactcagattggatatgggattggtcaagtcggccagaaaatgttcccccc

SEQ ID NO: 2553 - protein, 261 aa, Rattus norvegicus
  ref <308>: DATABASE ACCESSION NUMBER: Refseq / NP_114190
  ref <309>: DATABASE ENTRY DATE: 2003-01-13
MAESHLQSSLITASQFFEIWLHFDADGSGYLEGKELQNLIQELLQARKKAGLELSPEMKTFVDQYGQRDDGKIGIVELAHVLPTEENFLLLFRCQQLKSCEEFMKTWRKYDTDHSGFIETEELKNFLKDLLEKANKTVDDTKLAEYTDLMLKLFDSNNDGKLELTEMARLLPVQENFLLKFQGIKMCGKEFNKAFELYDQDGNGYIDENELDALLKDLCEKNKQELDINNISTYKKNIMALSDGGKLYRTDLALILSAGDN

SEQ ID NO: 2554 - DNA, 2531 bp, Homo sapiens
  ref <308>: DATABASE ACCESSION NUMBER: Refseq / NM_004929
  ref <309>: DATABASE ENTRY DATE: 2003-01-15
agggagagaactctggaggaacgctgagctgagcagcaccgaggacagcgcccggcagcgcccgcgcccaggtctccctccgcagccctgactcgcgcacacgctgagcttttgctcactccccttcgcgcggacacagacacacgcatattcacacacccagacacacaccccgctgtacaatggcagaatcccacctgcagtcatccctcatcacagcctcacagtttttcgagatctggctccatttcgacgctgacggaagtggttacctggaaggaaaggagctgcagaacttgatccaggagctccagcaggcgcgaaagaaggctggattggagttatcacctgaaatgaaaacttttgtggatcagtatgggcaaagagatgatggaaaaataggaattgtagagttggctcacgtattacccacagaagagaatttcctgctgctcttccgatgccagcagctgaagtcctgtgaggaattcatgaagacatggagaaaatatgatactgaccacagtggcttcatagaaactgaggagcttaagaactttctaaaggacctgctagaaaaagcaaacaagactgttgatgacacaaaattagccgagtatacagacctaatgctgaaactatttgattcaaataatgatgggaagctggaattaactgagatggccaggttactaccagtgcaggagaattttcttcttaaattccagggaatcaaaatgtgtgggaaagagttcaataaggcttttgagctgtatgatcaggacggcaatggatacatagatgaaaatgaactggatgctttactgaaggatctgtgcgagaagaataaacaggatctggatattaataatattacaacatacaagaagaacataatggctttgtcggatggagggaagctgtaccgaacggatcttgctcttattctctgtgctggggataactagagttggtggccgcaaccacttgctagtgatacactgtatctaaaaaataactgtgcactataagggagtaggctgtattttcttttatatctgtaaatttaactgcatatagataattatccaggatgtgtggctcattcttttcagcttgtttctatactgtttgtaatatacagtttttgtaaccatatgattgaaaagaagaaagtctatgcttaggccagtcagtacacccaattttaaaaaataacatattcttgctttcacaaatatagttgaacaagatttccctaaaaattccaccaggattaatctctaaaattctagtctctgatttgcaaatgcacatttgtcactgaataatggaattatgtataacaagccaaacattcttattttagacaaccatagaactgtcccacaaaatatttctaagcttatttctaactattaggaggaatgtgcttttccatctaaaatactcaccaaaatatagttaattgtggctttatgaagttaacagtctcattacagatttagtttaccaatcaacagcatgtctactgcttggatccatacaaaactatcggttcaagttgatgtgacaagggaagggagcaccagatgacacataaatctgtctgattctatgcctgtatttccaacaaacttactgtcagagaatatgacctaaatccattttctaaactgttttcatgtgttgcaaattattctagtcaactgctgttttatgtcatactctgtgtaatctctgattaaatttaatatactgcatatcctggtgtctagtttgcatacttcctggattttctttctatgtagaactgttcatttccaccaagggtatctgctgcctctgaaaatatttttttctagctataacaactctattttttactacataattaaattttaatgtaaaattcatagcatcctgattattgaatgttatatcatcaatacttttgtgtattctgtggattctatatttcatattgagatcagcattcaaaatagttctatttctatctgcaaatagtttcaaatgagtttaaaaaaataacatctgaaaagaaatgctaatgtaatcatttatcttatctagcaagaagattctaaaacattctttaacatacatctaagtcagtttcacatatttgtagctagaatatcctatactggttatagttgatatgtaacagttggtgattttagatttctttgattgtgaaacagggagctatgagagatgtgtccatgtgaaatttacagttactgcctaggagttaatgatcgttctgggtcagcttgaatgtccccattctataaattcaacacttattttctgaattcataaaaataaccaaaaaatgtgagctataatgtttccctcaagaacaaacagaaacgagatttgccaaaaactaaaattcaacaaatgatgttgagtgggagattggctttgcctttagcgtgtaaatggaagcactgccattagactgaatttaactactaagaataaataaagaagaaaataacctt

SEQ ID NO: 2555 - protein, 261 aa, Homo sapiens
  ref <308>: DATABASE ACCESSION NUMBER: Refseq / NP_004920
  ref <309>: DATABASE ENTRY DATE: 2003-01-15
MAESHLQSSLITASQFFEIWLHFDADGSGYLEGKELQNLIQELQQARKKAGLELSPEMKTFVDQYGQRDDGKIGIVELAHVLPTEENFLLLFRCQQLKSCEEFMKTWRKYDTDHSGFIETEELKNFLKDLLEKANKTVDDTKLAEYTDLMLKLFDSNNDGKLELTEMARLLPVQENFLLKFQGIKMCGKEFNKAFELYDQDGNGYIDENELDALLKDLCEKNKQDLDINNITTYKKNIMALSDGGKLYRTDLALILCAGDN

SEQ ID NO: 2556 - DNA, 711 bp, Rattus norvegicus
  ref <308>: DATABASE ACCESSION NUMBER: Refseq / NM_013019
  ref <309>: DATABASE ENTRY DATE: 2003-01-14
gggttcctctcgctctcgagactggaggacgaaccccgtggagctgtggcgcaggatggcgagaccgccatgtccgagacttacgatttcttgtttaagttcttggtcattggaaatgcgggaactggcaaatcctgcttgctccatcagttcattgagaagaaattcaaagatgactcaaatcataccataggagtggaattcggtcaaaagataataaatgttggtggtaaatatgtgaagttacagatatgggacacggctggacaggagcggttcaggtctgtcacgacaagctactacagaggtgcggctggggcactcctcgtctatgacatcaccagccgagaaacctacaatgcgcttactaattggttaacagatgccagaatgctggcgagccagaacatcgtcatcattctctgcgggaacaagaaggacctggatgccgaccgggaagtcaccttccttgaagcctccaggttcgcacaagagaatgagctcatgttcctggaaaccagtccactgactggcgagaacgtcgaagaggctttcatgcagtgcgcaaggaagatacttaacaaaattgaatcaggtgagctggaccccgagaggatgggctctggtatccagtatggagacgccgccttgagacagctacggtcaccccgacgtacacaggctccaagtgcacaggagtgtggctgctag

SEQ ID NO: 2557 - protein, 213 aa, Rattus norvegicus
  ref <308>: DATABASE ACCESSION NUMBER: Refseq / NP_037151
  ref <309>: DATABASE ENTRY DATE: 2003-01-14
MSETYDFLFKFLVIGNAGTGKSCLLHQFIEKKFKDDSNHTIGVEFGQKIINVGGKYVKLQIWDTAGQERFRSVTTSYYRGAAGALLVYDITSRETYNALTNWLTDARMLASQNIVIILCGNKKDLDADREVTFLEASRFAQENELMFLETSPLTGENVEEAFMQCARKILNKIESGELDPERMGSGIQYGDAALRQLRSPRRTQAPSAQECGC

SEQ ID NO: 2558 - DNA, 5500 bp, Rattus norvegicus
  ref <308>: DATABASE ACCESSION NUMBER: Refseq / NM_031235
  ref <309>: DATABASE ENTRY DATE: 2003-01-13
gccacacggccccgggccgccgccgagcgcgccaagacgccgagacgccgaacaggtggccggaggctgcaggcgcccgggcggggacaggcgagggcaagtgaaggcggccgggctggacatggtagccgggcagctctgtgcggccgcctgctcgcgcccctagccgccggcgcgccggcgcagcggccccaccgcgccctgcgtacagtctcccggcccagcggcgctcgggccacggacggcgagggacggcggcatgaaagtgaccgtgtgcttcgggaggacccgggtggtcgtgccgtgcggagatggccgcatgaaagttttcagccttatccagcaggcggtgacccgctaccggaaggccgtggccaaggatccaaactactggatacaggtacatcgcttggagcatggggacggtgggattctagacctggatgacatcctctgtgacgttgccgatgacaaagacagactggtagcagtgtttgatgagcaggatccccaccatggaggagatggtacgagtgccagctccacgggaacccagagtccagagatattcggcagtgagctgggcaccaacaatgtttctgcttttcggccttatcaaaccacaagtgaaattgaggtcacgccttcagtccttcgggcaaatatgcctcttcacgtccgacggagcagtgacccagctttaactggcctatccacttccgtcagtgataacaacttttcctcagaggagccctccaggaaaaaccccacccgctggtccacgacagctggctttctcaagcagaacaccactggaagtcccaaaacctgcgacaggaagaaagatgaaaactacaggagcctcccacgggatcccagtagctggtccaaccagttccagagagacaacgcccgctcctctctgagtgccagccacccaatggtagaccggtggctggagaagcaagaacaggacgaggaaggcacagaagaagacagcagccgagtggagccggttggacatgctgatactggactggagaatatgcccaacttttccctcgatgatatggtaaagctcgtacaagtccccaacgatggagggcccctgggaatccatgtagtgcctttcagtgctcgaggcggcagaacactggggttgttagtgaagcggttggagaaaggtgggaaggctgaacaagaaaaccttttccacgagaatgactgcattgtgaggattaacgatggagatcttcgaaacagaagatttgagcaagcacagcatatgttccgccaagccatgcgtgcgcgagtcatttggttccacgtggtccctgcagcgaacaaggagcagtatgaacagctctcccaacgagagatgaacaactattcccctggccgcttcagccccgacagccactgtgtggccaacaggagtgtggccaacaatgcgcctcaggcgttgcccagagcacccagactgagccagccacctgagcagctggatgctcacccccgactacctcatagtgctcatgcctcaaccaaaccgcccacagccccagccttggctccaccgaatgtgcttagtaccagtgtcggcagtgtgtacaacacgaagagagtaggcaagaggctcaacattcagcttaaaaaaggtacagaaggactgggatttagcatcacttcccgagacgtaactataggtggctcagctcccatttatgtcaagaacattcttcctcgaggggctgccattcaggatggcaggctcaaggcgggagaccggctaatagaggtcaatggagtagatttagcgggcaagtcccaggaggaagttgtttccctgttgagaagcaccaagatggaggggaccgtgagccttctggtctttcgtcaagaagaggctttccacccaagggaaatgaatgccgaacccagccagatgcagagtccaaaagaaacgaaagccgaagacgaggacattgttctcacacctgacggtaccagggagtttctgactttcgaagttccactgaatgactcagggtctgcagggcttggtgtcagcgtcaaggggaaccgctccaaagagaaccatgcagatttggggatcttcgttaagtccatcattaacgggggagctgcatctaaagatgggaggctgagggtaaatgaccagctgatagctgtgaacggagagtctctgctgggcaaagccaaccaggaagccatggagactctgaggaggtccatgtccaccgagggcaacaagcgtggcatgatccagctcatcgtggcgaggcggatcagcagatgtaacgagttgcggtctcctgggagccccgctgcacccgagctgcccatagaaacagagttggatgacagagaacgcaggatctcacactccctctacagtgggatcgaggggctggatgagtctcccaccaggaatgccgcactcagcaggataatgggtgagtcaggtaaatgccagctctccccaaccgtgaacatgccacatgatgacactgtcatgattgaagatgacaggctgcctgtgctccctcctcacctctctgaccagtcctcctccagctcccatgatgacgtgggattcataatgacagaagcaggcacgtgggccaaggctaccatcagtgactcagccgactgctcattgagtccagatgttgatccggttctcgcttttcaacgagaaggatttggacgccagagtatgtcagaaaaacgcacaaagcaattttcaaatgccagtcaattggatttcgttaaaacacgaaaatcaaaaagcatggatttaggtatagctgacgagactaaactcaatacagtggatgaccagagagcaggctcccccaatagagatgtgggaccctccttgggtctgaagaaatccagctctttagaaagtctgcagacggctgttgctgaggtgaccctgaatgggaacattcctttccaccgcccacggccacgaatcatccgaggaaggggctgcaacgagagcttcagagccgccattgacaagtcctacgataagcccatggtggatgacgacgacgaaggcatggagaccttggaagaagacacagaagaaagttcaaggtcagggagggagtccgtgtccacgtccagtgatcagccttcctattctctggagagacaaatgaatggagacccagagaagagggacaaggcagagaagaaaaaggacaaagccggaaaggataagaagaaagaccgagagaaggagaaggataaactgaaagccaagaaggggatgctgaaaggcttgggggacatgttcaggtttggcaaacatcgaaaagatgacaagatggaaaaaatgggtcgaataaaaatccaggactctttcacctcagaagaggacagggtgcggatgaaggaggaacaggagaggattcaagccaaaactcgagaatttagggagcggcaagctcgagagcgcgactatgctgaaatccaagatttccatcgaacatttggctgtgatgacgagttgctgtatgggggcatgtcatcctatgatggctgcctggctctcaatgccagaccccagagcccaagagaaggtcacctgatggacactttgtatgcacaagtaaagaaacctcggagctccaaacctggggacagcaatcgatccacccctagcaaccatgaccggatacaacgtctacggcaagaattccagcaagccaaacaggatgaggacgtggaagaccggcgccgtacctacagctttgagcaatcttggtccagctcacggccagcatcgcagagtggtcggcactcggtgtcagtggaggttcaagtgcagcggcagcgccaggaggagcgagagagcttccagcaggcccagcgccagtacagctccctgccaagacaaagcaggaagaatgccagctctgtatcacaggattcctgggaacagaactacgcccctggtgaaggcttccagagtgccaaggagaaccccaggtattccagttaccagggctccaggaacggctatctaggtggccatggctttaatgccagggtcatgctggagacccaggagcttctccgacaggagcagaggcgaaaagagcagcaactgaagaagcagccaccagcggatggagtcagagggcccttccggcaagatgtacccccgtctccatctcaggtggccaggctgaacagactgcagacacccgagaaagggcggcccttctactcctgagctcaatggaggatggcagcattttgtgtcatgcaataaaggacatttccccgtgaagacttgtgctcctggagtttattttttacaaaaaccctccatttggtggtactacagaacacttctgtcactggtatcagtgcctttaagcagcaggagcaaagaaatggaaggccttaatgtctttgccacgcgtatatctcgtggaaggaccccatccccaccccaccccaacctcaagttcaaggcatctactccctgcttctcagcagtaccggaaacttcagctccatataaggtgcctgtggacgtcacagcttcatcttagagaggggaccccccctccccccgccacgtgttgccgacacccgttccctgtggacgtgacatctcggtctctggaggacggaagtggctgcagcatgcaccagagcgagggctttccagaacttcgcagcagggctacccatgttctcccactcggtctggggttccctttctttcctcagatcctcggagcgtgaaggctctagggtggtagtgaagaagctaagccataggccagtgccgtttggttctggggggtgagggtaactttccaactgccttataactccaccacccatatcacagcgattctagtcagtgtttataagtacatgcgttcagtttcagtcactcatgacactcgggaacaaggggcatgggagtggcccatgtgtacgcaccccgaggaaggagataggagctgagggaagactctctggaggagcttaggccggtctatccagtccttactttacttcgtgtcaccgtaggttgtcaagggaggcacagagtgggacaaggaaaaaggtcagtcacttgggattctgagaatcaacctcaacacagcttttgaggttgcagtcaggatttggtctcctatatcctcataccatgtcccgacctgacgaggccaacattactgagtgactctgctgtttattcacaaacagaaggagagccatcccactcgaggacctgtcgatgtccctctgagcaccgggagtcccattctccgtgcatgcctgtggcacgaggccctccgtgttcccgccgttcatctgttggtctgaacatcctgtattgtaaaccaaggctgggttgctaaagtgcctgagaatctcgatataaaaaacaaaaaacaaaaaatccttgggcaaaaagctcagagtaccatgtattaac

SEQ ID NO: 2559 - protein, 1337 aa, Rattus norvegicus
  ref <308>: DATABASE ACCESSION NUMBER: Refseq / NP_112514
  ref <309>: DATABASE ENTRY DATE: 2003-01-13
MKVTVCFGRTRVVVPCGDGRMKVFSLIQQAVTRYRKAVAKDPNYWIQVHRLEHGDGGILDLDDILCDVADDKDRLVAVFDEQDPHHGGDGTSASSTGTQSPEIFGSELGTNNVSAFRPYQTTSEIEVTPSVLRANMPLHVRRSSDPALTGLSTSVSDNNFSSEEPSRKNPTRWSTTAGFLKQNTTGSPKTCDRKKDENYRSLPRDPSSWSNQFQRDNARSSLSASHPMVDRWLEKQEQDEEGTEEDSSRVEPVGHADTGLENMPNFSLDDMVKLVQVPNDGGPLGIHVVPFSARGGRTLGLLVKRLEKGGKAEQENLFHENDCIVRINDGDLRNRRFEQAQHMFRQAMRARVIWFHVVPAANKEQYEQLSQREMNNYSPGRFSPDSHCVANRSVANNAPQALPRAPRLSQPPEQLDAHPRLPHSAHASTKPPTAPALAPPNVLSTSVGSVYNTKRVGKRLNIQLKKGTEGLGFSITSRDVTIGGSAPIYVKNILPRGAAIQDGRLKAGDRLIEVNGVDLAGKSQEEVVSLLRSTKMEGTVSLLVFRQEEAFHPREMNAEPSQMQSPKETKAEDEDIVLTPDGTREFLTFEVPLNDSGSAGLGVSVKGNRSKENHADLGIFVKSIINGGAASKDGRLRVNDQLIAVNGESLLGKANQEAMETLRRSMSTEGNKRGMIQLIVARRISRCNELRSPGSPAAPELPIETELDDRERRISHSLYSGIEGLDESPTRNAALSRIMGESGKCQLSPTVNMPHDDTVMIEDDRLPVLPPHLSDQSSSSSHDDVGFIMTEAGTWAKATISDSADCSLSPDVDPVLAFQREGFGRQSMSEKRTKQFSNASQLDFVKTRKSKSMDLGIADETKLNTVDDQRAGSPNRDVGPSLGLKKSSSLESLQTAVAEVTLNGNIPFHRPRPRIIRGRGCNESFRAAIDKSYDKPMVDDDDEGMETLEEDTEESSRSGRESVSTSSDQPSYSLERQMNGDPEKRDKAEKKKDKAGKDKKKDREKEKDKLKAKKGMLKGLGDMFRFGKHRKDDKMEKMGRIKIQDSFTSEEDRVRMKEEQERIQAKTREFRERQARERDYAEIQDFHRTFGCDDELLYGGMSSYDGCLALNARPQSPREGHLMDTLYAQVKKPRSSKPGDSNRSTPSNHDRIQRLRQEFQQAKQDEDVEDRRRTYSFEQSWSSSRPASQSGRHSVSVEVQVQRQRQEERESFQQAQRQYSSLPRQSRKNASSVSQDSWEQNYAPGEGFQSAKENPRYSSYQGSRNGYLGGHGFNARVMLETQELLRQEQRRKEQQLKKQPPADGVRGPFRQDVPPSPSQVARLNRLQTPEKGRPFYS

SEQ ID NO: 2560 - DNA, 4071 bp, Homo sapiens
  ref <308>: DATABASE ACCESSION NUMBER: Refseq / NM_019619
  ref <309>: DATABASE ENTRY DATE: 2002-12-23
atgaaagtgaccgtgtgcttcggacggacccgggtggtcgtgccgtgcggggacggccacatgaaagttttcagcctcatccagcaggcggtgacccgctaccggaaggccatcgccaaggatccaaactactggatacaggtgcatcgcttggaacatggagatggaggaatactagaccttgatgacattctttgtgatgtagcagacgataaagacagactggtagcagtgtttgatgagcaggatccacatcacggaggtgatggcaccagtgccagttccacgggtacccagagcccagagatatttggtagtgagcttggcaccaacaatgtctcagcctttcagccttaccaagcaacaagtgaaattgaggtcacaccttcagtccttcgagcaaatatgcctcttcatgttcgacgcagtagtgacccagctctaattggcctctccacttctgtcagtgatagtaatttttcctctgaagagccttcaaggaaaaatcccacacgctggtcaacaacagctggcttcctcaagcagaacactgctgggagtcctaaaacctgcgacaggaagaaagatgaaaactacagaagcctcccgcgggatactagtaactggtctaaccaatttcagagagacaatgctcgctcgtctctgagtgccagtcacccaatggtgggcaagtggctggagaaacaagaacaggatgaggatgggacagaagaggataacagtcgtgttgaacctgttggacatgctgacacgggtttggagcatatacccaacttttctctggatgatatggtaaagctcgtagaagtccccaacgatggagggcctctgggaatccatgtagtgcctttcagtgctcgaggcggcagaaccctggggttattagtaaaacgattggagaaaggtggtaaagctgaacatgaaaatctttttcgtgagaatgattgcattgtcaggattaatgatggcgaccttcgaaatagaagatttgaacaagcacaacatatgtttcgccaagccatgcgtacacccatcatttggttccatgtggttcctgcagcaaataaagagcagtatgaacaactatcccaaagtgagaagaacaattactattcaagccgttttagccctgacagccagtatattgacaacaggagtgtgaacagtgcagggcttcacacggtgcagagagcaccccgactgaaccacccgcctgagcagatagactctcactcaagactacctcatagcgcacacccctcgggaaaaccaccatccgctccagcctcggcacctcagaatgtatttagtacgactgtaagcagtggttataacaccaaaaaaataggcaagaggcttaatatccagcttaagaaaggtacagaaggtttgggattcagcatcacttccagagatgtaacaataggtggctcagctccaatctatgtgaaaaacattctcccccggggggcggccattcaggatggccgacttaaggcaggagacagacttatagaggtaaatggagtagatttagtgggcaaatcccaagaggaagttgtttcgctgttgagaagcaccaagatggaaggaactgtgagccttctggtctttcgccaggaagacgccttccacccaagggaactgaatgcagagccaagccagatgcagattccaaaagaaacgaaagcagaagatgaggatattgttcttacacctgatggcaccagggaatttctgacatttgaagtcccacttaatgattcaggatctgcaggccttggtgtcagtgtcaaaggtaaccggtcaaaagagaaccacgcagatttgggaatctttgtcaagtccattattaatggaggagcagcatctaaagatggaaggcttcgggtgaatgatcaactgatagcagtaaatggagaatccctgttgggcaagacaaaccaagatgccatggaaaccctaagaaggtctatgtctactgaaggcaataaacgaggaatgatccagcttattgttgcaaggagaataagcaagtgcaatgagctgaagtcacctgggagcccccctggacctgagctgcccattgaaacagcgttggatgatagagaacgaagaatttcccattccctctacagtgggattgaggggcttgatgaatcccccagcagaaatgctgccctcagtaggataatgggtgagtcaggtaaataccagctgtcccctacagtgaatatgccccaagatgacactgtcattatagaagatgacaggttgccagtgcttcctccacatctctctgaccagtcctcttccagctcccatgatgatgtggggtttgtgacggcagatgctggtacttgggccaaggctgcaatcagtgattcagccgactgctctttgagtccagatgttgatccagttcttgcttttcaacgagaaggatttggacgtcagagtatgtcagaaaaacgcacaaagcaattttcagatgccagtcaattggatttcgttaaaacacgaaaatcaaaaagcatggatttaggtatagctgacgagactaaactcaatacagtggatgaccagaaagcaggttctcccagcagagatgtgggtccttccctgggtctgaagaagtcaagctcgttggagagtctgcagaccgcagttgccgaggtgactttgaatggggatattcctttccatcgtccacggccgcggataatcagaggcaggggatgcaatgagagcttcagagctgccatcgacaaatcttatgataaacccgcggtagatgatgatgatgaaggcatggagaccttggaagaagacacagaagaaagttcaagatcagggagagagtctgtatccacagccagtgatcagccttcccactctctggagagacaaatgaatggaaaccaagagaaaggtgataagactgatagaaaaaaggataaaactggaaaagaaaagaagaaagatagagataaggagaaggataaaatgaaagccaagaagggaatgctgaagggcttgggagacatgttcaggtttggcaaacatcgaaaagatgacaagattgagaaaacgggtaaaataaaaatacaggaatcctttacatcagaagaggagaggatacgaatgaagcaggagcaggagaggattcaagccaaaactcgagaatttagggaacgacaagctcgagagcgtgactatgctgaaattcaagattttcatcggacatttggctgtgatgatgagttaatgtatgggggagtttcttcttatgaaggttccatggctctcaacgctagacctcagagcccacgagaagggcatatgatggatgctttgtatgcccaagtcaagaagccgcggaattccaaaccctcacctgtagacagtaacagatcaactcctagcaatcatgatcggatacagcgtctgaggcaagaatttcagcaagcaaagcaagatgaagatgtagaagatcgtcggcggacctatagttttgagcaaccctggccgaacgcacggccggcgacgcagagcgggcgacactcggtgtccgtggaggtgcagatgcagcggcagcggcaggaggagcgcgagagctcccagcaggcccagcgccagtacagctctctgcctcggcaaagcaggaaaaatgccagctcggtctcccaggactcttgggagcagaactactcccctggggaaggcttccagagtgccaaagagaaccccaggtactccagctaccaaggctccaggaacggctacctgggaggacatggcttcaacgccagggtcatgctggaaactcaggagctccttcgccaggaacagaggcggaaggagcagcagatgaagaagcagcctccttccgaggggcccagcaactatgactcgtataagaaagtccaggaccccagttacgcccctcccaaggggcccttccggcaagatgtgcccccctccccttctcaggttgcgaggctgaacagacttcagactcctgagaaagggaggcccttctattcctga

SEQ ID NO: 2561 - protein, 1356 aa, Homo sapiens
  ref <308>: DATABASE ACCESSION NUMBER: Refseq / NP_062565
  ref <309>: DATABASE ENTRY DATE: 2002-12-23
MKVTVCFGRTRVVVPCGDGHMKVFSLIQQAVTRYRKAIAKDPNYWIQVHRLEHGDGGILDLDDILCDVADDKDRLVAVFDEQDPHHGGDGTSASSTGTQSPEIFGSELGTNNVSAFQPYQATSEIEVTPSVLRANMPLHVRRSSDPALIGLSTSVSDSNFSSEEPSRKNPTRWSTTAGFLKQNTAGSPKTCDRKKDENYRSLPRDTSNWSNQFQRDNARSSLSASHPMVGKWLEKQEQDEDGTEEDNSRVEPVGHADTGLEHIPNFSLDDMVKLVEVPNDGGPLGIHVVPFSARGGRTLGLLVKRLEKGGKAEHENLFRENDCIVRINDGDLRNRRFEQAQHMFRQAMRTPIIWFHVVPAANKEQYEQLSQSEKNNYYSSRFSPDSQYIDNRSVNSAGLHTVQRAPRLNHPPEQIDSHSRLPHSAHPSGKPPSAPASAPQNVFSTTVSSGYNTKKIGKRLNIQLKKGTEGLGFSITSRDVTIGGSAPIYVKNILPRGAAIQDGRLKAGDRLIEVNGVDLVGKSQEEVVSLLRSTKMEGTVSLLVFRQEDAFHPRELNAEPSQMQIPKETKAEDEDIVLTPDGTREFLTFEVPLNDSGSAGLGVSVKGNRSKENHADLGIFVKSIINGGAASKDGRLRVNDQLIAVNGESLLGKTNQDAMETLRRSMSTEGNKRGMIQLIVARRISKCNELKSPGSPPGPELPIETALDDRERRISHSLYSGIEGLDESPSRNAALSRIMGESGKYQLSPTVNMPQDDTVIIEDDRLPVLPPHLSDQSSSSSHDDVGFVTADAGTWAKAAISDSADCSLSPDVDPVLAFQREGFGRQSMSEKRTKQFSDASQLDFVKTRKSKSMDLGIADETKLNTVDDQKAGSPSRDVGPSLGLKKSSSLESLQTAVAEVTLNGDIPFHRPRPRIIRGRGCNESFRAAIDKSYDKPAVDDDDEGMETLEEDTEESSRSGRESVSTASDQPSHSLERQMNGNQEKGDKTDRKKDKTGKEKKKDRDKEKDKMKAKKGMLKGLGDMFRFGKHRKDDKIEKTGKIKIQESFTSEEERIRMKQEQERIQAKTREFRERQARERDYAEIQDFHRTFGCDDELMYGGVSSYEGSMALNARPQSPREGHMMDALYAQVKKPRNSKPSPVDSNRSTPSNHDRIQRLRQEFQQAKQDEDVEDRRRTYSFEQPWPNARPATQSGRHSVSVEVQMQRQRQEERESSQQAQRQYSSLPRQSRKNASSVSQDSWEQNYSPGEGFQSAKENPRYSSYQGSRNGYLGGHGFNARVMLETQELLRQEQRRKEQQMKKQPPSEGPSNYDSYKKVQDPSYAPPKGPFRQDVPPSPSQVARLNRLQTPEKGRPFYS

SEQ ID NO: 2562 - DNA, 4029 bp, Rattus norvegicus
  ref <308>: DATABASE ACCESSION NUMBER: EMBL / M88469
  ref <309>: DATABASE ENTRY DATE: 2000-03-04
ccctccctcttcgcgctccttcgccaccgcccgcccctcagctccgctgctcggctccgctcagagcagcgcagctccgcagccaaagcgaggcgggctcgggctccccaccgccagtgccacccgggctcctccagctttcgcctctgcagctcccgtcacttggagtaaaagtgtcctgacaggggtctgcaacatcagcagaaagttgggaggtcctcgagaatgaggctatctcccgcgcccctgaggcttagccggggtccggcgctgctggccctggcgctgcccctggccgcagcgctcgctttctcggatgagaccctggacaaagtggccaagtcggagggctactgcagccgcatcttgcgcgcccagggcacacggcgtgagggatacacagagttcagcctccgcgtggaaggcgaccctgacttctataagccaggaagcagctaccgagtgacactctcggctgcccctccctcctacttcagaggcttcacgttaattgctctcaaagagaaccgcgaaggcgataaggaagaagaccacgcgggcaccttccagatcatagatgaagaagaaacccagtttatgagtaactgtcctgtggcagtcactgaaagcacccctcggaggaggacacggatccaggtgttttggatagcgccacccacagggacaggctgtgtgattctgaaggccagcattgtacagaaacgcattatctattttcaagacgagggctccctgaccaagaagctgtgtgaacaggatcccacacttgatggagtgacggacagaccgatcttagactgctgcgcctgcggaactgccaagtacagactcacgttttatgggaactggtcggagaagactcatccaaaggattaccctcgtcgggctaatcactggtctgccatcattggcggatcccactccaagaactacgtgctgtgggagtacggagggtatgccagtgaaggggtcaagcaagttgctgaacttggctcaccagtaaaaatggaggaagaaattcgacaacagagtgatgaagtcctcactgtcatcaaagccaaagcccagtggccatcctggcagcctgtcaatgtgagagcagcaccctcagccgaattctcagtggacaggacacgccacttgatgtccttcctaaccatgatgggccccagtcctgactggaacgtgggcctatctgcagaggatctgtgcaccaaggagtgtggctgggtccagaaagtggtgcaggacctaattccctgggatgctggcacggacagcggggtgacctacgagtcaccaaacaagcccacaattcctcaggaaaaaatccgacccctgactagtctggaccatcctcagagtcctttctatgacccggaaggtgggtccatcacacaagtggccagagtcgtcatcgagagaattgcccggaagggagaacaatgcaacattgtacctgacaatgtggatgatattgtagccgacctggctccagaagagaaagatgaagatgacacccctgaaacctgcatctactccaactggtccccatggtcggcctgcagctcttccacttgtgaaaagggtaagaggatgcggcaacgcatgctgaaggcacagctggacctcagtgtcccctgtcctgacacccaggacttccagccctgcatgggccccggctgcagcgatgaagatggctccacctgtaccatgtcggagtggatcacctggtcaccctgcagtgtctcgtgtggcatgggtatgaggtcccgggagaggtacgtgaagcagttcccggaagacggctcggtgtgcatgctgcccacggaagagacagagaagtgcacggtcaacgaggagtgctctcctagcagctgcctggtgactgagtggggtgagtgggatgactgcagcgccacctgtggaatgggcatgaagaagcggcaccgcatggtcaagatgagccccgcggacggctccatgtgcaaggcggagacttcgcaggcggagaaatgcatgatgcctgagtgccataccatcccgtgcttgctgtctccttggtccgagtggagcgactgtagcgtgacctgtgggaagggcatgcggacgcgccagcggatgctcaagtctctggcagagctgggggactgtaatgaggatctggagcaggcggagaagtgtatgctgccagagtgccccattgactgcgaactcagtgagtggtcccagtggtctgaatgtaacaagtcctgtgggaaaggtcacatgattcgaacccggacaatccaaatggaacctcagtttggaggtgcaccctgcccagagactgtgcaacgcaagaagtgccgtgcccggaaatgccttcgcagcccatcgatccagaagctgcgctggagggaggcccgagagagcaggaggagtgagcagctgagggaagagtcagatggagagcagttcccaggctgtcggatgcgcccgtggacagcctggtcagagtgcaccaaactgtgcggaggtgggatccaagaacgctacatgactgtgaagaagaggttcaaaagctcccagtttaccagctgcaaagacaagaaggagatcagagcgtgcaacgtgcacccttgttagtaggggttcaactccccagggctgcattccagattctagtcaccaatggttgggtggtgtatttgcttgtttaagatgatttaaattgtgtccacatgttttcatttttaccggtgtggtttgcccaatagtcttatggaggccgagggacatcttgtctgaatacttcttggtgagtacaggccaagcggggcatcttgtccccaggcgccatcttcctgcactgagttgagtagtgttggttcaccttggtactaaactgaatcgtgtccctctggagcatcccctggtcaagcagggtggagactttggccatccacaaggagaagcaaccaggatgcagcatgcgggagacacagccattaattgcaaaggacagatcctcctctctcacctttggcctgctcactcttacagaaacctgtttgtccgcctccttttttatttagcacaactccaggcatcttggtaagtctccagggtcatgggttcttcggtgccctgaaggagaagccctgaggtgaggtggcatttgttacaaacctcccaatactgctttactggcatcacaaggtcagcaggtgatgatggctacttcatttcattgtgagccgtgatttccgttgagttttgattgttggtgccataaatgtcctaggatgctggacggacacatcagccttgtcagcagatccttctttgagccaatgtagacagtaagctgggcactggttccaaagccaacttaaaatcttcctacacatatccagacctttttttaggttgcccaaacttccttagaataaagcattttagctctgagaactacttgataagtctgccaggaagcccccaagtcaattcttcaacaaaaatactatcttccctacttaattttttttaagtcatgatattttatagttagaggagagagagacaatctattcccatgactaagacacaaacctacaagaaagggttactcagtcaagcctgtgcctgacttctggaccaggcccctgattttcatggatagtccaaaggaaggccaggggttcccactgactccaagccatcagcagcacccaaacccaggagcaacaaatattcagagaaagaggatgtttatctcagctatgagctcattggcaggttgtactcatgcatctgttaaaagcaccaccacatccttttgcaagtctgtttattaccgcttcatccaaatacattttgtggtcaagatcgacacagtgctatgaatacagtactttaaggtctgcattaaacacatcagaatatttcctgccacatctatgtacaacccctgaatatgtatttttccttaacacaagagagcctgttcaattaaaaaaaaaaaaa

SEQ ID NO: 2563 - protein, 808 aa, Rattus norvegicus
  misc_feature (1)..(808): Xaa=Unknown amino acid
MRLSPAPLRLSRGPALLALALPLAAALAFSDETLDKVAKSEGYCSRILRAQGTRREGYTEFSLRVEGDPDFYKPGSSYRVTLSAAPPSYFRGFTLIALKENREGDKEEDHAGTFQIIDEEETQFMSNCPVAVTESTPRRRTRIQVFWIAPPTGTGCVILKASIVQKRIIYFQDEGSLTKKLCEQDPTLDGVTDRPILDCCACGTAKYRLTFYGNWSEKTHPKDYPRRANHWSAIIGGSHSKNYVLWEYGGYASEGVKQVAELGSPVKMEEEIRQQSDEVLTVIKAKAQWPSWQPVNVRAAPSAEFSVDRTRHLMSFLTMMGPSPDWNVGLSAEDLCTKECGWVQKVVQDLIPWDAGTDSGVTYESPNKPTIPQEKIRPLTSLDHPQSPFYDPEGGSITQVARVVIERIARKGEQCNIVPDNVDDIVADLAPEEKDEDDTPETCIYSNWSPWSACSSSTCEKGKRMRQRMLKAQLDLSVPCPDTQDFQPCMGPGCSDEDGSTCTMSEWITWSPCSVSCGMGMRSRERYVKQFPEDGSVCMLPTEETEKCTVNEECSPSSCLVTEWGEWDDCSATCGMGMKKRHRMVKMSPADGSMCKAETSQAEKCMMPECHTIPCLLSPWSEWSDCSVTCGKGMRTRQRMLKSLAELGDCNEDLEQAEKCMLPECPIDCELSEWSQWSECNKSCGKGHMIRTRTIQMEPQFGGAPCPETVQRKKCRARKCLRSPSIQKLRWREARESRRSEQLREESDGEQFPGCRMRPWTAWSECTKLCGGGIQERYMTVKKRFKSSQFTSCKDKKEIRACNVHPCX

SEQ ID NO: 2564 - DNA, 3726 bp, Homo sapiens
cagagtgatgaggtcctcaccgtcatcaaagccaaagcccaatggccagcctggcagcctctcaacgtgagagcagcaccttcagctgaattttccgtggacagaacgcgccatttaatgtccttcctgaccatgatgggccctagtcccgactggaacgtaggcttatctgcagaagatctgtgcaccaaggaatgtggctgggtccagaaggtggtgcaagacctgattccctgggacgctggcaccgacagcggggtgacctatgagtcacccaacaaacccaccattccccaggagaaaatccggcccctgaccagcctggaccatcctcagagtcctttctatgacccagagggtgggtccatcactcaagtagccagagttgtcatcgagagaatcgcacggaagggtgaacaatgcaatattgtacctgacaatgtcgatgatattgtagctgacctggctccagaagagaaagatgaagatgacacccctgaaacctgcatctactccaactggtccccatggtccgcctgcagctcctccacctgtgacaaaggcaagaggatgcgacagcgcatgctgaaagcacagctggacctcagcgtcccctgccctgacacccaggacttccagccctgcatgggccctggctgcagtgacgaagacggctccacctgcaccatgtccgagtggatcacctggtcgccctgcagcatctcctgcggcatgggcatgaggtcccgggagaggtatgtgaagcagttcccggaggacggctccgtgtgcacgctgcccactgaggaaacggagaagtgcacggtcaacgaggagtgctctcccagcagctgcctgatgaccgagtggggcgagtgggacgagtgcagcgccacctgcggcatgggcatgaagaagcggcaccgcatgatcaagatgaaccccgcagatggctccatgtgcaaagccgagacatcacaggcagagaagtgcatgatgccagagtgccacaccatcccatgcttgctgtccccatggtccgagtggagtgactgcagcgtgacctgcgggaagggcatgcgaacccgacagcggatgctcaagtctctggcagaacttggagactgcaatgaggatctggagcaggtggagaagtgcatgctccctgaatgccccattgactgtgagctcaccgagtggtcccagtggtcggaatgtaacaagtcatgtgggaaaggccacgtgattcgaacccggatgatccaaatggagcctcagtttggaggtgcaccctgcccagagactgtgcagcgaaaaaagtgccgcatccgaaaatgccttcgaaatccatccatccaaaagctacgctggagggaggcccgagagagccggcggagtgagcagctgaaggaagagtctgaaggggagcagttcccaggttgtaggatgcgcccatggacggcctggtcagaatgcaccaaactgtgcggaggtggaattcaggaacgttacatgactgtaaagaagagattcaaaagctcccagtttaccagctgcaaagacaagaaggagatcagagcatgcaatgttcatccttgttagcaagggtacgagttccccagggctgcactctagattccagagtcaccaatggctggattatttgcttgtttaagacaatttaaattgtgtacgctagttttcatttttgcagtgtggttcgcccagtagtcttgtggatgccagagacatcctttctgaatacttcttgatgggtacaggctgagtggggcgccctcacctccagccagcctcttcctgcagaggagtagtgtcagccaccttgtactaagctgaaacatgtccctctggagcttccacctggccagggaggacggagactttgacctactccacatggagaggcaaccatgtctggaagtgactatgcctgagtcccagggtgcggcaggtaggaaacattcacagatgaagacagcagattccccacattctcatctttggcctgttcaatgaaaccattgtttgcccatctcttcttagtggaactttaggtctcttttcaagtctcctcagtcatcaatagttcctggggaaaaacagagctggtagacttgaagaggagcattgatgttgggtggcttttgttctttcactgagaaattcggaatacatttgtctcacccctgatattggttcctgatgcccccccaacaaaaataaataaataaattatggctgctttatttaaatataaggtagctagtttttacacctgagataaataataagcttagagtgtatttttcccttgcttttgggggttcagaggagtatgtacaattcttctgggaagccagccttctgaactttttggtactaaatccttattggaaccaagacaaaggaagcaaaattggtctctttagagaccaatttgcctaaattttaaaatcttcctacacacatctagacgttcaagtttgcaaatcagtttttagcaagaaaacatttttgctatacaaacattttgctaagtctgcccaaagcccccccaatgcattccttcaacaaaatacaatctctgtactttaaagttattttagtcatgaaattttatatgcagagagaaaaagttaccgagacagaaaacaaatctaagggaaaggaatattatgggattaagctgagcaagcaattctggtggaaagtcaaacctgtcagtgctccacaccagggctgtggtcctcccagacatgcataggaatggccacaggtttacactgccttcccagcaattataagcacaccagattcagggagactgaccaccaagggatagtgtaaaaggacattttctcagttgggtccatcagcagtttttcttcctgcatttattgttgaaaactattgtttcatttcttcttttataggccttattactgcttaatccaaatgtgtaccattggtgagacacatacaatgctctgaatacactacgaatttgtattaaacacatcagaatatttccaaatacaacatagtatagtcctgaatatgtacttttaacacaagagagactattcaataaaaactcactgggtctttcatgtctttaagctaagtaagtgttcagaaggttcttttttatattgtcctccacctccatcattttcaataaaagatagggcttttgctcccttgttcttggagggaccattattacatctctgaactacctttgtatccaacatgttttaaatccttaaatgaattgctttctcccaaaaaaagcacaatataaagaaacacaagatttaattatttttctacttggggggaaaaaagtcctcatgtagaagcacccacttttgcaatgttgttctaagctatctatctaactctcagcccatgataaagttccttaagctggtgattcctaatcaaggacaagccaccctagtgtctcatgtttgtatttggtcccagttgggtacattttaaaatcctgattttggagacttaaaaccaggttaatggctaagaatgggtaacatgactcttgttggattgttattttttgtttgcaatggggaatttataagaagcatcaagtctctttcttaccaaagtcttgttaggtggtttatagttcttttggctaacaaatcattttggaaataaagattttttactacaaaaatg

SEQ ID NO: 2565 - protein, 494 aa, Homo sapiens
MSFLTMMGPSPDWNVGLSAEDLCTKECGWVQKVVQDLIPWDAGTDSGVTYESPNKPTIPQEKIRPLTSLDHPQSPFYDPEGGSITQVARVVIERIARKGEQCNIVPDNVDDIVADLAPEEKDEDDTPETCIYSNWSPWSACSSSTCDKGKRMRQRMLKAQLDLSVPCPDTQDFQPCMGPGCSDEDGSTCTMSEWITWSPCSISCGMGMRSRERYVKQFPEDGSVCTLPTEETEKCTVNEECSPSSCLMTEWGEWDECSATCGMGMKKRHRMIKMNPADGSMCKAETSQAEKCMMPECHTIPCLLSPWSEWSDCSVTCGKGMRTRQRMLKSLAELGDCNEDLEQVEKCMLPECPIDCELTEWSQWSECNKSCGKGHVIRTRMIQMEPQFGGAPCPETVQRKKCRIRKCLRNPSIQKLRWREARESRRSEQLKEESEGEQFPGCRMRPWTAWSECTKLCGGGIQERYMTVKKRFKSSQFTSCKDKKEIRACNVHPC

SEQ ID NO: 2566 - DNA, 409 bp, Rattus norvegicus
  ref <308>: DATABASE ACCESSION NUMBER: EMBL / AA800176
  ref <309>: DATABASE ENTRY DATE: 2000-03-03
gatggatcacgacaactaagggagtgacttctttggcctttcaagacatagcagcaccacaccccactgccccaagcagcttcactctgctacaagcctctccctgcgaatgttttcagagtgattgaatccagggatgggaggaggcctggcaggcactgaggggcaggagtcggctggaagaggaggtgtgtgggcttgggcttcctcctaagcatcctggaggttgctactgctcatgaggacctgctctccaggcttgaacgctggcatcccaaggtacgggcagttggcacatcggaaagcatctcccaggtagcaatttccacaggctgacttgggctgagagctctgcgccttggactgctctttctccagttcctctgccaagccacaggtgcagttctta

SEQ ID NO: 2567 - DNA, 2105 bp, Homo sapiens
  ref <308>: DATABASE ACCESSION NUMBER: Refseq / NM_020313
  ref <309>: DATABASE ENTRY DATE: 2002-04-24
atggcagattttgggatctctgctggccagtttgtggcagtggtctgggataagtcatccccagtggaggctctgaaaggtctggtggataagcttcaagcgttaaccggcaatgagggccgcgtgtctgtggaaaacatcaagcagctgttgcaatgtttagtcccaggaagcaccactctgcacagtgctgagattttggctgaaatcgcccggatccttcggcctggtggatgtctttttctgaaggagccagtagagacagctgtagataacaatagcaaagtgaagacagcatctaagctgtgttcagccctgactctttctggtcttgtggaagtgaaagagctgcagcgggagcccctaacccctgaggaagtacagtctgttcgagaacaccttggtcatgaaagtgacaacctgctgtttgttcagatcacaggcaaaaaaccaaactttgaagtgggttcttctaggcagcttaagctttccatcaccaagaagtcttctccttcagtgaaacctgctgtggaccctgctgctgccaagctgtggaccctctcagccaacgatatggaggacgacagcatgtgcatcttctgtggatgtagtttaactcaccgttggcctcttgagcatgtggtcaggttgaacatgatgatcaaccaaaaggaggacagggtggacaccttctttaccctggactccaagtttcctctcgaagcctgcagtcactttagcttttcattagcagagaccacgactgtatcactcattgctttgaacactctccaggatctcattgactcagatgagctgctggatccagaagatttgaagaagccagatccagcttccctgcgggctgcttcttgtggggaagggaaaaagaggaaggcctgtaagaactgcacctgtggccttgctgaagaactggaaaaagagaagtcaagggaacagatgagctcccaacccaagtcagcttgtggaaactgctacctgggcgatgccttccgctgtgccagctgcccctaccttgggatgccagccttcaaacctggggaaaaggtgcttctgagtgatagcaatcttcatgatgcctaggaggttcctgacatgggacccatctgctcctccagccaactcctgtccctcacatcccaccatggtggctcctcccacctcctctggatttgttcactctgagatctgtttgcagagtgggtgcttagcagacagagtgaagctggctggggggcacagtggtgtgtagtgctgctgtgtatcaaaagaccaaggtattatgggacctggtttcagaatgggatgggtttcttcacctcatgttaagagaagggagtgtgtcctgaagaagcccttcttctgatgttaaaatgctgaccagaacgctcttgagcccaggcatcgttgagcattaacactctgtgacagagctgcagacccctgccttgagtctcatctcagcaatgctgccaccctcttgtctttcagagttgttagtttactccattctttgtgacacgagtcaagtggctcacaacctcctcagggcaccagaggactcactcactggttgctgtgatgatatccagtgtccctctgcccccttccatccccaaccacatttgactgtagcattgcatctgtgtcctgttgtcatttatgttaaccttcaggtattaaacttgctgcatatcttgacatatcttgagattctgcatgtcttgtaaagagaggggatgtgcatttgtgtgtgatgttggatagtcatccacgctcagtttggaccattggaggaacttagtgtcacgcacaaatggggctattcctacgcttagaatagggcttgtctgcccactttagaagagtccaggttggtgagcatttagagggaagcagggcagaactctgaacgacaatacgtctctctgagcagagacccctttgttcttgttatccacccatatggacttggaatcaatcttgccaaatatttggagagattgtgtggatttaagagacctggatttttatattttaccagtaaataaaagttttcattgatatctgtccttgaaacttga

SEQ ID NO: 2568 - protein, 367 aa, Homo sapiens
  ref <308>: DATABASE ACCESSION NUMBER: Refseq / NP_064709
  ref <309>: DATABASE ENTRY DATE: 2002-04-24
MADFGISAGQFVAVVWDKSSPVEALKGLVDKLQALTGNEGRVSVENIKQLLQCLVPGSTTLHSAEILAEIARILRPGGCLFLKEPVETAVDNNSKVKTASKLCSALTLSGLVEVKELQREPLTPEEVQSVREHLGHESDNLLFVQITGKKPNFEVGSSRQLKLSITKKSSPSVKPAVDPAAAKLWTLSANDMEDDSMCIFCGCSLTHRWPLEHVVRLNMMINQKEDRVDTFFTLDSKFPLEACSHFSFSLAETTTVSLIALNTLQDLIDSDELLDPEDLKKPDPASLRAASCGEGKKRKACKNCTCGLAEELEKEKSREQMSSQPKSACGNCYLGDAFRCASCPYLGMPAFKPGEKVLLSDSNLHDA

SEQ ID NO: 2569 - DNA, 353 bp, Rattus norvegicus
  ref <308>: DATABASE ACCESSION NUMBER: EMBL / AI639111
  ref <309>: DATABASE ENTRY DATE: 2000-03-04
tagtgacaggaacccgtagggtcatttgtgagaaccagaagctatcgctggggaatgccgttgggacttgagaagcagcctgtgaagacctaacgtggcccagtgcagcatcatggtaggagggagaggaaggagaaaagacaaacaagtcagcagagtctcaggagcctttgtatggcagctgaaggagtcatggtttgtcacaagtgtgctaggagctttcagagtatgcagagcagacaggtgacatgattaaattgctagttcaaaagctcattctctagctggaggtgtagctcagtgggaaagcatttgcttagccctgggtttgatccccaacaactacaccagaa

SEQ ID NO: 2570 - DNA, 586 bp, Rattus norvegicus
  ref <308>: DATABASE ACCESSION NUMBER: EMBL / AI639272
  ref <309>: DATABASE ENTRY DATE: 2000-03-04
aaagagggaaatggattaacatacaaatcaaagcgttctagtaagtccaattggaaggtgactccctgattccagttatctcacttacagtacgagcatttaaatcaaccgagcaaactgggcccaccaggatacactaaggacaggaagtaaagccaatgagaaatgggtagacagtgcatcagaacccagacagacaagaccccgaaactgtaagggaggttgaacattttctagtgttctgagattgggaaagttatgtcaagtttcgtgttactacctatgaagtgatgaaaaataagttgtgtggagtataaaggactaagggagcaaagagagtggtctactcgtccccttatctgcttgcttcatcgttagtggaacactagctttctaaatgtgtccttaccaaacagtgaagcttatatgtatctccaaacagtggtaacggtttactatatccatatataatgagaaagttttctataggtttttaaatggcacatttaaaggtgcatattatactctattgtgtgtatcatctacattaatgagacttctagaaataaattaattttactgtcaa

SEQ ID NO: 2571 - DNA, 1758 bp, Rattus norvegicus
  ref <308>: DATABASE ACCESSION NUMBER: EMBL / U57362
  ref <309>: DATABASE ENTRY DATE: 1999-07-28
ccaggagaaccgggtcgccagggaatgaaaggtgatgcaggagagccagggcttccaggccggacaggaaccccaggattacctggcccgccaggaccaatggggccaccaggagacagaggtttcactggaaaagatggtgcaatgggaccgagaggcccacctggcccaccgggaaccccaggctctccaggagttgcagggccaagtgggaaaccagggaaacctggagatcatggccgacctggtcaatctgggttaaaaggagaaaaaggtgataggggagacattgcttcccagaacatgatgcgagctgttgcaagacaagtgtgtgaacaactgatcagtggccagatgagcagattcaaccagatgctgaatcagattccaaacgattaccactcaaatcgaaaccagcctggcccaccaggacctccagggccccctggagctgctggagccagaggagaaccagggccggggggagcaccaggattccctggacgccctggagtccaaggacctccaggggaacgaggtttgcctggagagaaaggtgaaaggggtattgggtcgcaaggaccgaggggacctccagggcccccaggtccacaaggtgaatccagaacaggtccaccagggtctacaggttcaagaggccctcctggtccccctggtcgtccaggaaactcaggtatccgaggacccccaggtcctcctggatattgtgattcatcccagtgtgccagcattccatacaacgggcaaggctatccagagccttatgtgcccgagggcggggcctacctgcccgaccgcgagcccttcatcgtaccagtggagcctgagaggacggcagaatacgaggatgactacggggcagatgagcctgagcagcagcaccctgaccacaggcgttggcggcgagccctacgcccaggccctgggcaatgaacctgagaccacgggttcaccgaggtgggaggtgttgggattctcattcacaggtcagacagagcagcagtgacgttttctcagagtcggttcatccacaagtgctcctatctgactgtagagaatcttgtttctggagggaggctagctcgcaaccagtctgtagacatcttggctttggagtacaaatggtcacaacacaagcttttcacagaagctgcatggagagacacaaccagggtgcgctggggaggcgagcttcttggttggcctgcaagccctggaaaccagagcagctgtctcttcagaaaggggcctttatcttagaactaatctgcagttcaattgcaccccatttccagtcattccgtctcctaaagtcaaaaagaagggggaacagagctcactgtagccggtcacctatcttttcttcctcctcttatgctttagggcatagtctttttaacaaccacagaccttaagcctcgtagccgaagttattgtatcaactggatactgttccatattgctttcgacgtctttgttgacacactaacatttatgccaaattgcagattattctgctgccgagatggaattgcatgtttgtgttgtatatttagaatgaactttttttttttgcagaacatgtttcttagttatcaaagcagttggaaatgtttgcaagactatgaacatagagtcgctgcttttatattttaactgcagattgtaatttcactgccttatattatttatttctgaaacaaaagaggcatttttcaataaaactactgaaatttg

SEQ ID NO: 2572 - DNA, 4050 bp, Rattus norvegicus
  ref <308>: DATABASE ACCESSION NUMBER: Refseq / NM_031707
  ref <309>: DATABASE ENTRY DATE: 2002-11-05
ctgaagctggcttttgcgtttttctacacgtacactaattttatggaatagttaaagtgctatattctccgcgcaaccttttcaaattccaaatgtttgaacgttttggtgtcagcgcgagtgaaatcattttaccgacaagaactaactgaattgtctgcctcgttgagttgcctccggaaaagatctcgggggtggaaaagcaactgcaaaataacagacggagaaaattccttggaagttatttctgtagcataagagcagaaacttaagagcaagttttcattgggcaaaatgggggaacaacctatcttcagcactcgagctcatgtcttccagatcgacccaaacacaaagaagaactgggtacccaccagcaagcatgcagttactgtgtcttatttctatgacagcacaaggaatgtgtataggataatcagtctagacggctcaaaggcaataataaatagcaccatcactccaaacatgacatttactaaaacatctcaaaagtttggccaatgggctgatagccgggcaaacactgtttatggactgggattctcctctgagcatcatctctcaaaatttgcagaaaagtttcaggaatttaaagaagctgctcggctggcaaaggagaagtcgcaggagaagatggaactgaccagtaccccttcacaggaatcagcaggaggagatcttcagtctcctttaacaccagaaagtatcaatgggacagatgatgagagaacacccgatgtgacacagaactcagagccaagggctgagccagctcagaatgcattgccattttcacatagtgccggggatcgaacccagggcctctctcatgctagttcagccatcagcaaacactgggaggctgaactagccacgctcaaggggaacaatgccaagctcaccgcagcgctgctggagtccactgccaacgtgaagcagtggaagcaacagctggctgcctaccaggaggaggcagagcggctgcacaagcgggtcacggagctggaatgtgttagtagtcaagcaaacgcggtgcacagccacaagacagagctgagtcagacagtgcaggagctggaagagaccctaaaagtaaaggaagaggaaatagaaagattaaaacaagaaattgataacgccagagaacttcaagaacagagggactctttgactcagaaactacaggaagttgagattcgaaataaagacctggaggggcagctgtcggagctggagcagcgcctggagaagagccagagcgagcaggacgctttccgcagtaacctgaagactctcctagagattctggacgggaaaatatttgaactaacagaattgcgggataatttggccaagctactagaatgcagctaaagaaagtgaaatttcagtgccaatagatgaagagatactgtctgtcttcgtaggactgtttgggctctgtaccaagattgcacaaaattttttgaatatcattcctccagaaggagggtgttttgaaaattggaattgtatatttcagtataaattttagaatttagcttatagctagttgggggaaaaaagacatgaaaaacttgaaccacaaattacctccatgtacattggccatagttaaccagaaagttataagtagacacttaatgcaatcttttcccctgatagtagccaatgggagaattaacaatgtctgggtcccttctcctttttctgttcaacacagtgaagattatctgctttttaaatttatttacgatatctacagctgtgttttgtgtaaaaacttagtaatggaagccctgtctttgttgttatctgaataatttctcaggatatttttttgctgctgagaaagggccattaccaattaatccttgccaggagttggggagctatgtctctaattggaatcactataactgggtgtctggagttcttcccttttcgtactgagagtgttctcactctagtgactcctctggtacactccgtgttctccaatcttgtctgttgtactttacttttccatattgactccatgtatttatgagaagatattatctcccattttattatacattttgaagccaactaaacaaaggcagctgagtccttcagatatttttctttttaaatttatagtaaatttgacacagaactgaaattcagcagtccgtctttgacggtttagtctagcaatgttaaggatatttagagaaaatatgcagttacgtttatttatatatttggcaagaaattttttctggatgatcaatgcttttcaatttatgataaataatggttagggggcgctgtttattatagataattttaaggtatatagctgttttcaaggaggtccacttccgtctagcagccaagcagaggactgtatctaaatcgtgatcgtggcagatgggtcttcatagaaaccatgtctttattcaaacttcatagggcaatattttgaactgttacctaggcatttcaaaacaggaaataccgtcaacagactcttctccaagagcaggttttactgttgttttgatgtaattttaagacatttagcaaacatgcatttctttatatgatacatttctttcacaaaacaatttaaaagtaagccacgtgctgtctgctctgcccgggtaggaattgcatcagaatacatatatcttgctgtacaatgcctgtgatattgaagagggttcttttcatgtatgcttgagtatctaactctggagtcaatgaatgcactgacttttttttttgttcgtaccccaaatgattgaattgttaagtacaaattaagcagattaactcattttttcactcataaacagattcttagtactagttttgttttatatttatgtgtatgtatgtaaatacatacatattaatttatattagagtgaaaaataaattgtttgtttctaacattagtttctacagtaaggtgtctctgaaacatgtgtgtcagacacttagccaccatgcattctatgtgctaccccatcatgccagtcacctccatcgacgttagggtattttccttacctgtctattataaagagaataacttaggtacacatgctcagagccgagatatttctctgataaatcaggtaataaaatctatttgatgggtagaattttgaaaacagacatgattttatctatgagtttctgaatatcaaagaacaccaggttttcatttaaatagaggtctaacactagggatcagggaatttagttatgaagagtttaaaaaaaaaatctaaaaaagtaaaaaaaaaacagtataagctgttgataaggtaagcaaattattttaatgatgtaataaaatatttttaaattttggcatagtgatcatttaatgggaaaatactcaccaaaatgtctccacttgaattgtactgataatgtgaggcatatgtgtaactcaatatatacatatacctatatgtatatacagaaattatttttaatattttcctactgctgtgaaatttaaaattggaaaattttgtgagtgttttccatgtccaatagagcctaactgtttcttttttagtaacttaacaatctcttgagggctgcacctataaagtcccagcttgtcagtagacatgtacagtgtttgggataaggtggacacagtgcacatatgagtaagaccttcctgactattttaaacatcactcacatgaggagagcctctatgctataggttgtgtgcctactgtagcttttccatcgctgtattatatagacatttgcatattaaaatttgattttcccagagataaatattatatagtgtatctatatttagatcaaactgtggtaacatgttgatgagatcatagcgttggggaatgtagcctgaacgtgtggactcgcagagaccccgagggagagcaggggtcaatcccatctgtgtataagttattataactatgaaatcttgtacaaaagcaaaaactggaaaaaaaaacaaaaatacagtttttattttgaaat

SEQ ID NO: 2573 - protein, 366 aa, Rattus norvegicus
  ref <308>: DATABASE ACCESSION NUMBER: Refseq / NP_113895
  ref <309>: DATABASE ENTRY DATE: 2002-11-05
MGEQPIFSTRAHVFQIDPNTKKNWVPTSKHAVTVSYFYDSTRNVYRIISLDGSKAIINSTITPNMTFTKTSQKFGQWADSRANTVYGLGFSSEHHLSKFAEKFQEFKEAARLAKEKSQEKMELTSTPSQESAGGDLQSPLTPESINGTDDERTPDVTQNSEPRAEPAQNALPFSHSAGDRTQGLSHASSAISKHWEAELATLKGNNAKLTAALLESTANVKQWKQQLAAYQEEAERLHKRVTELECVSSQANAVHSHKTELSQTVQELEETLKVKEEEIERLKQEIDNARELQEQRDSLTQKLQEVEIRNKDLEGQLSELEQRLEKSQSEQDAFRSNLKTLLEILDGKIFELTELRDNLAKLLECS

SEQ ID NO: 2574 - DNA, 1445 bp, Homo sapiens
  ref <308>: DATABASE ACCESSION NUMBER: Refseq / NM_004272
  ref <309>: DATABASE ENTRY DATE: 2003-01-28
attttgtggaatagagttgatcgctgtctcctccgcaaagcattttaactcgaataagcaaatgccgcctctgtttgaacgttttggtatttacaagagagaaatcattttacctaagagaactaattgaattggcagcatccttgaaatacctccggacaaggatctgggggtgggggtggaaaagcaactgcgaaatagcagacggagaaattcctttggaagttattccgtagcataagagctgaaacttcagagcaagttttcattgggcaaaatgggggaacaacctatcttcagcactcgagctcatgtcttccaaattgacccaaacacaaagaagaactgggtacccaccagcaagcatgcagttactgtgtcttatttctatgacagcacaagaaatgtgtataggataatcagtttagatggctcaaaggcaataataaatagtaccatcaccccaaacatgacatttactaaaacatctcagaagtttggccagtgggctgatagccgggcaaacaccgtttatggattgggattctcctctgagcatcatctttcgaaatttgcagaaaagtttcaggaatttaaagaagctgctcgactagcaaaggaaaaatcacaagagaagatggaacttaccagtacaccttcacaggaatccgcaggcggggatcttcagtctcctttaacaccggaaagtatcaacgggacagatgatgaaagaacacctgatgtgacacagaactcagagccaagggctgaaccaactcagaatgcattgccattttcacatagttcagcaatcagcaaacattgggaggctgaactggctaccctcaaaggaaataatgccaaactcactgcagccctgctggagtccactgccaatgtgaaacaatggaaacagcaacttgctgcctatcaagaggaagcagaacgtctgcacaagcgggtgactgaacttgaatgtgttagtagccaagcaaatgcagtacatactcataagacagaattaaatcagacaatacaagaactggaagagacactgaaactgaaggaagaggaaatagaaaggttaaaacaagaaattgataatgccagagaactacaagaacagagggattctttgactcagaaactacaggaagtagaaattcggaacaaagacctggagggacaactgtctgacttagagcaacgtctggagaaaagtcagaatgaacaagaagcttttcgcaataacctgaagacactcttagaaattctggatggaaagatatttgaactaacagaattacgagataacttggccaagctactagaatgcagctaaggaaagtgaaatttcagtgccaattaattaaaagatacactgtctctcttcataggactgtttaggctctgcatcaagattgcacaaaaaaaaaaaaaaaaaa

SEQ ID NO: 2575 - protein, 354 aa, Homo sapiens
  ref <308>: DATABASE ACCESSION NUMBER: Refseq / NP_004263
  ref <309>: DATABASE ENTRY DATE: 2003-01-28
MGEQPIFSTRAHVFQIDPNTKKNWVPTSKHAVTVSYFYDSTRNVYRIISLDGSKAIINSTITPNMTFTKTSQKFGQWADSRANTVYGLGFSSEHHLSKFAEKFQEFKEAARLAKEKSQEKMELTSTPSQESAGGDLQSPLTPESINGTDDERTPDVTQNSEPRAEPTQNALPFSHSSAISKHWEAELATLKGNNAKLTAALLESTANVKQWKQQLAAYQEEAERLHKRVTELECVSSQANAVHTHKTELNQTIQELEETLKLKEEEIERLKQEIDNARELQEQRDSLTQKLQEVEIRNKDLEGQLSDLEQRLEKSQNEQEAFRNNLKTLLEILDGKIFELTELRDNLAKLLECS

SEQ ID NO: 2576 - DNA, 2267 bp, Rattus norvegicus
  ref <308>: DATABASE ACCESSION NUMBER: Refseq / NM_017042
  ref <309>: DATABASE ENTRY DATE: 2003-01-14
cccgcccggcccggcacctagccgagccccgggcccagcatggccgccccggagccggcccgggccgcgccgccccctcccccgcccccgccgccccccctcggggccgaccgcgtcgtcaaagccgttccttttcccccaactcaccggttgacatctgaagaagtgtttgatatggatgggatacccagggttgatgttctgaagaaccatctggtaaaagaaggtcgggtagatgaagaaattgcactaagaattatcaatgagggtgctgccatacttaggcgggagaaaaccatgatagaagtagaagctccaattacagtgtgtggtgacatccatggccaattttttgatctgatgaaactttttgaagtaggaggatcacctgctaatacacgatacctttttcttggtgattatgtggacagaggttattttagtatagagtgtgtcttgtatttatgggtcttgaagattctatacccaagcacattattccttctgagaggcaaccatgaatgcagacacctcactgagtattttacctttaagcaggaatgtaaaattaagtattcagaaagggtctatgaagcttgtatggaggcttttgacagcttgccccttgctgcacttctaaaccaacaatttctttgtgttcatggtggactttcaccagagatacacacactggatgatattaggagattagatagatttaaagagccacctgcatttggaccaatgtgtgacttgctgtggtctgatccttctgaagactttggaaatgaaaaatcacaagaacattttagtcataatacggttcgaggatgttcttatttttataactatccagcagtgtgtgaatttttgcaaaacaataatttgttatcgattattagagctcatgaagctcaagatgcaggctatagaatgtacagaaaaagtcaaactacagggtttccttcattaataacaattttttcggcacctaattacttagatgtctacaataataaagctgctgtactaaagtatgagaacaatgtgatgaacatccgccagtttaactgttctccacatccttactggttgcccaattttatggatgtctttacatggtctttaccatttgttggagaaaaagtcacagagatgttggtaaatgttctcagtatttgctctgatgatgaactaatgacagaaggggaagaccagtttgatgtaggttcagctgcagcccggaaagaaatcataagaaacaagatccgagcaattggcaagatggcaagagtcttctctgttctcagggaggagagtgaaagcgtgctgacactcaagggcctgactcccacagggatgttgcctagtggagtgttggctggaggacggcagaccttgcaaagtgccacagttgaggctattgaggctgaaaaagcaatacgaggatcctctccaccacatagaatctgcagttttgaagaggcaaagggtttggataggatcaatgagagaatgccaccccggaaagatgctgtgcagcaagatggtttcaattccctgaacaccgcacataccactgagaaccacgggactggcaaccatagtgcccagtgaccagcggcttcccagggatggacagatcactaaggagccggaggggtcggccgagctgatgataaatgtcataatctctctgaagaaacaaaccattgtgctttttgagacccttgcccccttcccggatggaggcttgagggccttgggacttgtgctgtccataagattggggaatcgctgccacagcggagagcagtgagcaaggggcttggggcaaattccagtggaggaagcccaaacctccatttatgcttgtggttcacacatttacgtttacaaatgagatttcctttgttttctccctcagtagaattagatttttttcaaccatgactttaaatgcaatctttagagttaatgtggaacctccctcacccccaccccatgaaatgtctttaagaggatggattagcatggtcttaaaatatatttctgaggttactagatgtattttgaattgtagacaaaatctgagaaacccagttggtgtttatataaaaacgctgacctcaggtcatagttcttaaatgtggctaattctgtaacatagtcttggtatttttcaattatgaatgcataaactatttctaagaagactcttacttgaacaagatccaaaaaaccaatttagatcctttttgcccccg

SEQ ID NO: 2577 - protein, 525 aa, Rattus norvegicus
  ref <308>: DATABASE ACCESSION NUMBER: Refseq / NP_058738
  ref <309>: DATABASE ENTRY DATE: 2003-01-14
MAAPEPARAAPPPPPPPPPPLGADRVVKAVPFPPTHRLTSEEVFDMDGIPRVDVLKNHLVKEGRVDEEIALRIINEGAAILRREKTMIEVEAPITVCGDIHGQFFDLMKLFEVGGSPANTRYLFLGDYVDRGYFSIECVLYLWVLKILYPSTLFLLRGNHECRHLTEYFTFKQECKIKYSERVYEACMEAFDSLPLAALLNQQFLCVHGGLSPEIHTLDDIRRLDRFKEPPAFGPMCDLLWSDPSEDFGNEKSQEHFSHNTVRGCSYFYNYPAVCEFLQNNNLLSIIRAHEAQDAGYRMYRKSQTTGFPSLITIFSAPNYLDVYNNKAAVLKYENNVMNIRQFNCSPHPYWLPNFMDVFTWSLPFVGEKVTEMLVNVLSICSDDELMTEGEDQFDVGSAAARKEIIRNKIRAIGKMARVFSVLREESESVLTLKGLTPTGMLPSGVLAGGRQTLQSATVEAIEAEKAIRGSSPPHRICSFEEAKGLDRINERMPPRKDAVQQDGFNSLNTAHTTENHGTGNHSAQ

SEQ ID NO: 2578 - DNA, 889 bp, Rattus norvegicus
  misc_feature (1)..(889): n=a, c, g or t
  ref <308>: DATABASE ACCESSION NUMBER: Refseq / NM_030986
  ref <309>: DATABASE ENTRY DATE: 2002-11-05
ggtggctggtggagtgaagctttggtagacatggctcccaacgcgttggctcctgaaccggagcatcccgaaggcatccgggccgtgttgctggggcctcccggggctggcaaggggacccaggcacccaaattggctgagaatttctgtgtctgtcacttggccactggggacatgctgagagcgatggtagcttcaggctcggagctggggaaaaagctgaaggcgacaatggatgccggaaaactggtgagtgatgaaatggtcgtggagctcattgagaagaatttggagactccttcctgcaaaaatggctttcttctagatggcttccctcggactgtgaagcaggctgaaatgcttgatgacctcatggataagaggaaagagaagctcgattcagtcatcgagttcagcatccaggactccctgctgatccggagaatcacgggaaggctgattcaccccaagagtggccggtcctaccatgaggagttcaaccctccaaaggaggccatgaaagatgatatcactggggagcccctgatccgcaggtcagatgacaacgagaaagccttgaagacccgcctggaggcctaccacactcagaccactccgcttgtggaatactacaggaaacggggcattcactgcgccattgatgcgtcccagacccctgacgtggtgtttgcaagcatcctggcagccttctccaaagccacatgtaaagacttggtcatgtttgtctaatgttgggtttgaagggcctcttttcttcctctctgtgaaaggaatggagggtggtcatggttaggtaggtagaaggaacttcctttctcagacagcaaggncaccttctaatgtactgattaagcacttacttgaaaaa

SEQ ID NO: 2579 - protein, 239 aa, Rattus norvegicus
  ref <308>: DATABASE ACCESSION NUMBER: Refseq / NP_112248
  ref <309>: DATABASE ENTRY DATE: 2002-11-05
MAPNALAPEPEHPEGIRAVLLGPPGAGKGTQAPKLAENFCVCHLATGDMLRAMVASGSELGKKLKATMDAGKLVSDEMVVELIEKNLETPSCKNGFLLDGFPRTVKQAEMLDDLMDKRKEKLDSVIEFSIQDSLLIRRITGRLIHPKSGRSYHEEFNPPKEAMKDDITGEPLIRRSDDNEKALKTRLEAYHTQTTPLVEYYRKRGIHCAIDASQTPDVVFASILAAFSKATCKDLVMFV

SEQ ID NO: 2580 - DNA, 2133 bp, Homo sapiens
  ref <308>: DATABASE ACCESSION NUMBER: Refseq / NM_013411
  ref <309>: DATABASE ENTRY DATE: 2002-12-13
gaactggtggcagtgagagacttcggcggacatggctcccagcgtgccagcggcagaacccgagtatcctaaaggcatccgggccgtgctgctggggcctcccggggccggtaaagggacccaggcacccagattggctgaaaacttctgtgtctgccatttagctactggggacatgctgagggccatggtggcttctggctcagagctaggaaaaaagctgaaggcaactatggatgctgggaaactggtgagtgatgaaatggtagtggagctcattgagaagaatttggagacccccttgtgcaaaaatggttttcttctggatggcttccctcggactgtgaggcaggcagaaatgctcgatgacctcatggagaagaggaaagagaagcttgattctgtgattgaattcagcatcccagactctctgctgatccgaagaatcacaggaaggctgattcaccccaagagtggccgttcctaccacgaggagttcaaccctccaaaagagcccatgaaagatgacatcaccggggaacccttgatccgtcgatcagatgataatgaaaaggccttgaaaatccgcctgcaagcctaccacactcaaaccaccccactcatagagtactacaggaaacgggggatccactccgccatcgatgcatcccagacccccgatgtcgtgttcgcaagcatcctagcagccttctccaaagccacatcctagtatcagaaggccaggcgagactgcaacactgctcatcaccccgcggcgtgatccctgctcttaggtgctgggcagaggggaagggtggtcagggtgaggatggtgagggagggctggtgaggggctcagaggaatacttggaacaacagcagtgttattgtagtgtggcagtttcttttatacataggtgagagtttttaaagtgtaagggaaaaattaattttttaaaaaacaccatgcttggagggtgggggtagaaatagacacaatattatttctaaggaatcgggttttcatttactctggactggtgaaaatattttttaaagccagtgctctaagacctcagcttttatctcagaaccccatgggttccagaccaagagtacaggaaatcaaattgttgtcctgtctgtctatagcttggaacagggagctttgattactgactccggttccacacactgtaagatcaaaaaaccatctccacatttgaaagagatgtaaggtgtattcatagggatggtggctcaacaaatcaagcaaactggaatcaaggggagggggaagggaatgaaatggaaagggaggctgattcccttcccctgacttaccactaatttactaggctacctactttcatgagtaacctctcacagctacccagcacatgccacaatcctatcgtcttgccttcttttatctgcactgtgtgaagggactcttttaaataaatgagcaagtgtcctaagctatgtcatccaaagattgtcctttccattctcaaatcctgtgactgggatcactcaacagcactgtgatgtattattttcaatgaggtgcctttcttaactgaccaaatgctgccttgtttggcccctaaatcaataaaatatgttaaaatttgtatcccctgttgtggcattttttttagataatctaagctagaaaaatgacattgaattctggacctggctggaaggaaaagaagccctttcttgtcgctggcagctgtgtggtaggaggtccaagtatgtgcatatgagataagcctgcaacctcttgaccttcagctcctatgcaggcttctcttgagcccagagacaaggcagcttggtctagtggagatagcactgtgcttggagttcaggggacctaggacaaatcccagccagttagttattcactgtgctcctgtttcctcagctgaaaaaggaagttggttatgccaccttcttggccttaatggcattaaatgaaatttataggaagaaggtttttgctcagtacctggcatgcaacagacattggataaatgttagttggatccagatatacacagaaagatatctgcttcctgccaggctggataactgttgaatgacacttgtccatagtctaga

SEQ ID NO: 2581 - protein, 232 aa, Homo sapiens
  ref <308>: DATABASE ACCESSION NUMBER: Refseq / NP_037543
  ref <309>: DATABASE ENTRY DATE: 2002-12-13
MAPSVPAAEPEYPKGIRAVLLGPPGAGKGTQAPRLAENFCVCHLATGDMLRAMVASGSELGKKLKATMDAGKLVSDEMVVELIEKNLETPLCKNGFLLDGFPRTVRQAEMLDDLMEKRKEKLDSVIEFSIPDSLLIRRITGRLIHPKSGRSYHEEFNPPKEPMKDDITGEPLIRRSDDNEKALKIRLQAYHTQTTPLIEYYRKRGIHSAIDASQTPDVVFASILAAFSKATS

SEQ ID NO: 2582 - DNA, 633 bp, Rattus norvegicus
  misc_feature (1)..(633): n=a, c, g or t
  ref <308>: DATABASE ACCESSION NUMBER: EMBL / AA799992
  ref <309>: DATABASE ENTRY DATE: 2000-03-03
agagtgaaatgatggcagtgatgtcaacatcatacggggaacaccaagtccacactttgccccgagtcaactgcaaccacatgcgtcttcttgcttaaggcacctgagcccacagtgacagaataggtccctggatagacttctatgtagaggtccttagagatgttctcaataggccaagatgactcttgagaatgctctgatgtttgatagatgcttcctggaccaacagatgtctctcctctgcagtttctctgtgctcactcctgccatttttgttaagcccctccactccactaccttgagatgactcgagctcaggagagccacctgcctctgtctcccaggtgctangattaaaggcatgcactaccacgcctggctcagaaacagaacctctagaacaacccatttgtagtcccacatgtacaagattatgtggcttttaagcctgctaagacttcagagcacctcgtgccgattcttggctcagggcaaatccctatgtgagtgtataaatcgtaacattcatgctgttccgtgtgattgtaccgccaaattcaaaaaattcaccggacataatgtaagctgcgtgccaaggtggctaccacataatgttggccacgccgcttc

SEQ ID NO: 2583 - DNA, 527 bp, Rattus norvegicus
  ref <308>: DATABASE ACCESSION NUMBER: EMBL / AA800593
  ref <309>: DATABASE ENTRY DATE: 2000-03-03
aaatatacacatataagatattttatttcaaaaagcacaagaacattatacaagtttttaatttacatttttgcaataaaagatatcaatatatgcatcatttgtataacttcatcatgaatggaatttgaatcagtggtataaacatgttgcagtcactaaatatagatcatcatcatcacagtgaaccaaaatgcatagttgttatgaaatgacaaatgaccactaaaaggggaactcacagcccatacactaacataataaattaattagacagatatatgtttacctttaatatcattaaaatccttgctaggccctcggagccatcctactaaaccaattctttcacattcgacactaaataaagtgacttggttgcttaggtaaacttcttagcagacttaaatcgtttgccatgatgaatactgttaaaagtcccttgggctggggcagcactgtggcctacgtccaccctccagtgcagagacttccatctcaagaagcagaactcagcaatggattag

SEQ ID NO: 2584 - DNA, 389 bp, Homo sapiens
  ref <308>: DATABASE ACCESSION NUMBER: EMBL / AW615086
  ref <309>: DATABASE ENTRY DATE: 2000-03-24
aaatatacacatatattttattttaaaaagcacaagaacattatacaagttttaaatttacatttttgcaataaaagttatcaatatatgcattatttgtataacttcatcatggatggaatttgaatcagtggtataaacatgttgcagtcactaaatatagatcatcatcacagtgaaccaaaatgcatagttgttatgaaatgacaaatgaccactaaaaggtgaactcacagcccatacaccaatataataaattaattatacagatatattttgcttcaccatatcattaaaattctcactagccccttaccaaacattagaaaaacacagttctggagccatcctgttgaaccagtgccttcacatactacactaaagaaaat

SEQ ID NO: 2585 - DNA, 598 bp, Rattus norvegicus
  ref <308>: DATABASE ACCESSION NUMBER: EMBL / AA800817
  ref <309>: DATABASE ENTRY DATE: 2000-03-03
gggggaaaatcccacagattttgtccactttcaaaaaaatgaaaaaaaaatatttacagaacagccatacacacagaaaatcaaattagaaatgcctttaagaaaacactcttctcactgctcctgatgtacatttttaaactcaaattttaaatctcaaccctatagttgaacattttcccaacctagtttctaccataatacttcctgtccctcaaaacttaactccaaacaaataattggaggacagggctaaaggtaaaatagaacacaagattacccagggattgtttgttttctatactgacatctgctgtgaccaatgaggacactgtgtgtgactcactggctctgctgaaaattcatgatatattgctgttacagattgtcaggcctccacctgacaaaaggaaaatccaattcaagagttatcaacctcaagctggctttggcaattacattaggtccccttcctcacctcggaaacacttgttttaagatacaatgaaatattcttgtacatcagagcagattttgtccaaagacccttaacatgaagcccaaagacagaagaatcaggtcaaactaacaatacatt

SEQ ID NO: 2586 - DNA, 552 bp, Rattus norvegicus
  ref <308>: DATABASE ACCESSION NUMBER: EMBL / AA874943
  ref <309>: DATABASE ENTRY DATE: 2000-03-03
acaaaatatttttttaaccatcatgccctgtttgcaaaaattttgaaaacaacaatttttaaaaattgaagaaaaaaaaaaaacctgttctggcagaaaaaaggaaatgaggaagtgagtcagagctcatttaagcaggcattgtcggtgctcaaacacacttggttttgtttgtttgtagatgtgcacacatccaggctgtctagtagggctgggtccgtggtctctccaaggcgatttacagcatgttggaagaaggaaatcaaaacttacttcgcacctacgccttttttttttccttgactcttttgtatattgtatcttttgggttcaccatagcaagttctccagtgttaagattttactcttttcatatttgaacaaccttacgggacttgggatttttttttccttgtggttcttatatatctctgtatactatttccgtgttgcaaaagtttgactgtcagctacatgttggttaaaaacaagcaaggtattactgtaactaagttatttttaaagttgaaatatatttttatgcgcctttgg

SEQ ID NO: 2587 - DNA, 2768 bp, Homo sapiens
  ref <308>: DATABASE ACCESSION NUMBER: Refseq / NM_006449
  ref <309>: DATABASE ENTRY DATE: 2002-11-05
ggcctggccggggcggcgcactcaggtggcctcgcttccctgcgggtcaccgcccgccactcgcacagctaggtcggcctgttgggatcgggagaggtgggcgcacgagttttagtgcgggagtccggggtgcgggcggagtcctattgtccccgtgcacccgggcggcagcacctccgggtccctctttaaaccgagcgtccggcgacctttctttgtgcttagggagtcgaaagcggcatcttctccgagagaagtcgcctactggggggtggcgctggggaggtaacaatgggcgcccattgtcctccgagggtccaacggtgaccccccccgctgcgcacgcgcccggccaccggttggccccgggccagggcacaggtaccgcggccgggagggtcggccccgctgcccgcgccctccgccccgccccagtgagtccccgcgccgccggccccgccccgcgccgccccgccctccgcaggttcagtcctcgcgtccggccgccccgcgctcagtcgcgcgcaccttctctcgcggccgggggaccgcagcgcggggctagcccggagacccggccaccggcctggggcgccttcacgccgtctcggagcggataatgcggtgagcaggcaccacgccggcagactcggctggatctgcgcacagcggcagggattgcgtgcgcccgcgggaggcccggggcagcggctgggatcctcagcggcggccggtttgtcctggttgtggtcaagactggatgatgtaactggctctctaggaagcctcacttggccgtaacctcaggaaggttctctttgaccccatctcatttcgaagccacttctgaagccacttgagaaaaatgatgtgacagttcctatcaaaaaggattcagaaacatataccatctgtgaagaaagtggccctttctcccgcttgcaaaatagacattctcaaattccaaaatgccagccaagaccccaatttacctgaaagcagccaataacaagaaaggaaagaaatttaaactgagggacattctgtctcctgatatgatcagtcccccgcttggagactttcgccacaccatccacattggcaaagagggccagcacgatgtctttggagatatttcctttcttcaagggaactacgagcttttacctggaaaccaggagaaagcacacctgggccagttccctgggcataatgagttcttccgggccaacagcacctcggactctgtgttcacagaaacgccctccccggtgctcaaaaatgccatctccctcccgaccattggaggatcccaagctctcatgttgcccttattgtcaccagtgacatttaattccaaacaggagtccttcgggccagcaaagctgcccaggcttagctgcgagcccgtcatggaggaaaaagctcaggagaaaagcagtctgttggagaatgggacagtccaccagggagacacctcgtggggctccagcggttctgcatctcagtccagccaaggcagagacagccactcctccagcctgtccgaacagtaccccgactggccagccgaggacatgtttgaccatcccaccccatgcgagctcatcaagggaaagactaagtcagaggagtccctctctgaccttacaggttccctcctctccctgcagcttgatcttgggccctcacttttggatgaggtgctgaatgtaatggataaaaataagtaacaagatgccaacttttttcctttggggtaaaaggtacaaaaacaaactaaccacagttgaagagaagggcttccggagctgtatttgcagttttgtgttgggttttctaaaataatattcttacaaagtatttttttacctgttatgccctgtttgcaaaaacaatttagaaaaaaacaacaaagcaaaacctatcttggcaaaaaaaggaagtgagtcagagcccattttcaggaggcattggtgatgttcggctcacatattgtttgcagacacacaagaaatctggcttggccaggattggcactagctatgaagggctgagcgagtcacattaaggaacttcacggaactttatagcactccgacattttctgagcaagaggaagtcaaaatttatttaacacctaagcctttttgtagactcttttctatatattgcttaggctcaccatagcgaattctccagtgttaaaacttttctgttttcacatttgaactttatgggttttggggattttcttgtagttcttatatatccctatatattatatctatattgcaaaattttgactgtcagctacatgttggtaagacacaggcaaagtattactgtaactaagttatttttaaagttaaaatatatttttacgtgcctttggctttttattgcagagtctacattttatagattctacatcagatgttgtcacttatttccattgggattccattgtaagctgtgtatgtgcgtgtttggaaaagtgtattcatacttagtttttttttcttcatctgttatcatacttttaacagcaaccaataacggattgtaaagtgtaaaggcacaggttactcatgatgcttctgcagagactgtgggctacaccacatatgttatttggaaatataggtattttagtacagtacatacttgcattacataggtacttcaagcaacacaataaaaagtaaatgataaaaaaaaaaaaaaaaaaaaaaaaaaaaaaaaaaaaaaaaaaaaaaaaaaaaaag

SEQ ID NO: 2588 - protein, 254 aa, Homo sapiens
  ref <308>: DATABASE ACCESSION NUMBER: Refseq / NP_006440
  ref <309>: DATABASE ENTRY DATE: 2002-11-05
MPAKTPIYLKAANNKKGKKFKLRDILSPDMISPPLGDFRHTIHIGKEGQHDVFGDISFLQGNYELLPGNQEKAHLGQFPGHNEFFRANSTSDSVFTETPSPVLKNAISLPTIGGSQALMLPLLSPVTFNSKQESFGPAKLPRLSCEPVMEEKAQEKSSLLENGTVHQGDTSWGSSGSASQSSQGRDSHSSSLSEQYPDWPAEDMFDHPTPCELIKGKTKSEESLSDLTGSLLSLQLDLGPSLLDEVLNVMDKNK

SEQ ID NO: 2589 - DNA, 555 bp, Rattus norvegicus
  ref <308>: DATABASE ACCESSION NUMBER: EMBL / AA894086
  ref <309>: DATABASE ENTRY DATE: 2000-03-03
cccttaggtgccatcccaataacagactgcttatgttgttcccatcattcaagctcccttgtgaagaatgtggctcatatgactaaagtccacagcttttttattcctgatatagagtatctttcagatttgaaaggattaattaaatatttgggagagaaagttggtgttggcaaaatctgcttgtggtgcaatgagaaagggaagtccttctattccacagaagctgtgcaggcacacatgaatgacaaaagccactgtaagctctttacagatggtgatgctgcgctggagtttgcagacttctatgattttaggagcagctctcatgcgtgaacgggacatgcagtatgtacagaggatgaagtcgaaatggatgctgaagaccgggatgaagaacaatgccaccaagcagatgcactttagggcccaagtgagattctgagaggctgaggctgagagatgtatctctggctgcattccctccttgtttgaggaccagtgaagccagattgccgaatggttcttttgctgctacttcatttgttctgattt

SEQ ID NO: 2590 - DNA, 1719 bp, Homo sapiens
  ref <308>: DATABASE ACCESSION NUMBER: Refseq / NM_033414
  ref <309>: DATABASE ENTRY DATE: 2002-12-23
ggcacgagggtcggcgtgtcgagtggctcttcctggctgctgaggcgggttaaggtctgagggtcttgtggggccacggcgctgatcaccaggtgtttggcttggtcggttcttatttctcgcctggcaatggcgacgtacacctgcataacttgccgggtggcgttccgcgacgcggacatgcagcgggcccactataagacggactggcaccgctacaacctgcggcggaaggtggccagcatggccccagtgaccgccgagggcttccaggagcgagtgcgggcgcagcgggccgtcgcggaggaggagagcaagggctcggccacctactgcaccgtttgcagtaagaagtttgcctctttcaacgcctacgagaaccacctcaagtcccggcgtcacgttgagctggagaagaaggccgtgcaggcagtgaatcggaaagtggagatgatgaatgaaaagaacttggagaaaggactgggcgtggacagtgtggacaaggatgccatgaacgcggccatccagcaggccatcaaggcccagccgtccatgtctcccaagaaggcgcccccagcgcctgcaaaggaggccaggaatgtcgtggccgtgggtactggtggccgtgggacccacgaccgagacccgagtgagaaaccaccccggctccagtggtttgaacagcaggcgaagaagttggcaaagcagcaggaggaggacagcgaggaggaggaagaggacctggatggagacgattgggaagatattgattctgatgaagaattggaatgtgaggatactgaagcaatggacgatgtggtggagcaggatgcagaggaggaagaggctgaggaaggcccaccccttggtgccatccctatcacggactgcttattttgttcccatcattccagctcgctgatgaagaatgtggctcacatgaccaaagaccacagtttctttattcctgatatagaatatctttcagatattaagggactgattaaatacttgggagagaaagttggtgttggcaagatttgcttgtggtgcaacgagaaagggaagtccttctactccacagaagctgtacaggcacatatgaatgacaaaagccactgtaagctcttcacagatggcgatgctgctttggaatttgcagacttctatgattttaggagtagctatccagatcacaaggaaggggaggaccccaataaggctgaggagttgccctcagaaaagaacttggaatatgatgatgaaaccatggaattgattctgccttctggtgccagagtgggtcatcgctccttgatgagatactacaaacagcgatttggcttgtcaagagctgtggcagttgccaaaaatcggaaggccgtgggccgagtacttcagcagtacagagccctgggatggactggcagcacaggagcggctcttatgcgagagcgagacatgcagtatgtccaaaggatgaaatcaaaatggatgctgaagacaggaatgaagaacaatgccaccaagcagatgcactttcgggtccaagtgagattctgagagtctgctgggattgagcaatcatctcctgcccaagtttcctccttgccctgaggaccagtgaaagacagatcataggagagacccttttgctgctacttcattcgttctgacctaataataaaagttagaaccataaaaaaaaaaaaaaaaaaa

SEQ ID NO: 2591 - protein, 477 aa, Homo sapiens
  ref <308>: DATABASE ACCESSION NUMBER: Refseq / NP_219482
  ref <309>: DATABASE ENTRY DATE: 2002-12-23
MATYTCITCRVAFRDADMQRAHYKTDWHRYNLRRKVASMAPVTAEGFQERVRAQRAVAEEESKGSATYCTVCSKKFASFNAYENHLKSRRHVELEKKAVQAVNRKVEMMNEKNLEKGLGVDSVDKDAMNAAIQQAIKAQPSMSPKKAPPAPAKEARNVVAVGTGGRGTHDRDPSEKPPRLQWFEQQAKKLAKQQEEDSEEEEEDLDGDDWEDIDSDEELECEDTEAMDDVVEQDAEEEEAEEGPPLGAIPITDCLFCSHHSSSLMKNVAHMTKDHSFFIPDIEYLSDIKGLIKYLGEKVGVGKICLWCNEKGKSFYSTEAVQAHMNDKSHCKLFTDGDAALEFADFYDFRSSYPDHKEGEDPNKAEELPSEKNLEYDDETMELILPSGARVGHRSLMRYYKQRFGLSRAVAVAKNRKAVGRVLQQYRALGWTGSTGAALMRERDMQYVQRMKSKWMLKTGMKNNATKQMHFRVQVRF

SEQ ID NO: 2592 - DNA, 1647 bp, Rattus norvegicus
  ref <308>: DATABASE ACCESSION NUMBER: Refseq / NM_017235
  ref <309>: DATABASE ENTRY DATE: 2003-01-14
gcaaggcgtgaatgatgcggaaggtggttttgattaccggggcgagcagtggcattgggctggccctttgcggtcggctgttggcagaagacgatgaccttcacctgtgtttggcgtgtaggaacctgagcaaagcaggagctgtccgtgatgccctgctggcctctcacccctccgccgaggtcagcattgtgcagatggatgtcagcaacttgcagtcggtggtccggggagcagaggaagtcaagcgaaggtttcaaagattagactacttatacctgaacgccggaatcatgcctaacccccagctaaacctcaaagcgtttttctgtggtatcttttcaagaaatgtgattcatatgttctccacagcggaaggacttttgacccagaatgacaagattactgctgatgggttccaggaggtgtttgaaaccaatctctttggccactttatcctgattcgggaactggaaccacttctctgccacagtgacaacccctctcagctcatctggacgtcttctcgaaatgcaaagaagtctaacttcagtcttgaggacatccagcacgccaaaggccaggaaccttacagctcttccaaatacgctactgacctcctgaatgtagctttgaacaggaatttcaatcagaagggtctgtattccagtgtgacgtgtccaggggtcgtaatgaccaatctgacgtatgggattctgcccccctttgtttggacgttgcttctcccggtgatatggctccttcgcttttttgcacatgcgttcactgtgacaccgtacaatggtgcagaggcattggtgtggcttttccaccaaaaaccggagtctctcaaccctctgaccaaatacttgagcggcaccacaggattagggactaattatgtcaagggccaaaagatggacgtagatgaagacactgcagaaaagttctacaagaccttactggagctagaaaagcaagtcaggatcaccattcagaaatcagatcaccacagctgacagcgacgttccccagagcatccagtccgcgtacgccctggtgcgcgcagctttctatcatactgggtgatacatgtttgtagtaaaccataagccatgatgatctctcctcctactttttagaatggtctccaagactgcgtgggtgcacttgtgagaaaggcgtcgcaaagcagaggggccagctgaataccctccagagtagtgtcctgtcagaattgctaaaggcttcccgcagagcatcctcggatagcattctgccacccggagcccagtagtttagacttgcgtgatggggacacagtacagcctgaatcttcttttagtcccagcgaggagaggcaatgctactgactaggacttctacttcctttgcttttctccatgatccctttttttttttttttaactctctttacattcttcatatgctgcttcggataatctcatacgttgtctgagcacgtggccccacgtgaccgcccacgcagtcattttcaggaacaaagtatgtttgtgtttgggccacaagcatggtttctgatctttaataacatccacagatgtattcattatgaacagcttatcgtcacgatcatagttcactggaattaaacttgtagcaaac

SEQ ID NO: 2593 - protein, 334 aa, Rattus norvegicus
  ref <308>: DATABASE ACCESSION NUMBER: Refseq / NP_058931
  ref <309>: DATABASE ENTRY DATE: 2003-01-14
MRKVVLITGASSGIGLALCGRLLAEDDDLHLCLACRNLSKAGAVRDALLASHPSAEVSIVQMDVSNLQSVVRGAEEVKRRFQRLDYLYLNAGIMPNPQLNLKAFFCGIFSRNVIHMFSTAEGLLTQNDKITADGFQEVFETNLFGHFILIRELEPLLCHSDNPSQLIWTSSRNAKKSNFSLEDIQHAKGQEPYSSSKYATDLLNVALNRNFNQKGLYSSVTCPGVVMTNLTYGILPPFVWTLLLPVIWLLRFFAHAFTVTPYNGAEALVWLFHQKPESLNPLTKYLSGTTGLGTNYVKGQKMDVDEDTAEKFYKTLLELEKQVRITIQKSDHHS

SEQ ID NO: 2594 - DNA, 1453 bp, Homo sapiens
  ref <308>: DATABASE ACCESSION NUMBER: Refseq / NM_016371
  ref <309>: DATABASE ENTRY DATE: 2002-11-05
agtgcgcgaagatgcgaaaggtggttttgatcaccggggctagcagtggcattggcctggccctctgcaagcggctgctggcggaagatgatgagcttcatctgtgtttggcgtgcaggaacatgagcaaggcagaagctgtctgtgctgctctgctggcctctcaccccactgctgaggtcaccattgtccaggtggatgtcagcaacctgcagtcggtcttccgggcctccaaggaacttaagcaaaggtttcagagattagactgtatatatctaaatgctgggatcatgcctaatccacaactaaatatcaaagcacttttctttggcctcttttcaagaaaagtgattcatatgttctccacagctgaaggcctgctgacccagggtgataagatcactgctgatggacttcaggaggtgtttgagaccaatgtctttggccattttatcctgattcgggaactggagcctctcctctgtcacagtgacaatccatctcagctcatctggacatcatctcgcagtgcaaggaaatctaatttcagcctcgaggacttccagcacagcaaaggcaaggaaccctacagctcttccaaatatgccactgaccttttgagtgtggctttgaacaggaacttcaaccagcagggtctctattccaatgtggcctgtccaggtacagcattgaccaatttgacatatggaattctgcctccgtttatatggacgctgttgatgccggcaatattgctacttcgcttttttgcaaatgcattcactttgacaccatataatggaacagaagctctggtatggcttttccaccaaaagcctgaatctctcaatcctctgatcaaatatctgagtgccaccactggctttggaagaaattatattatgacccagaagatggacctagatgaagacactgctgaaaaattttatcaaaagttactggaactggaaaagcacattagggtcactattcaaaaaacagataatcaggccaggctcagtggctcatgcctataattccagcactttgggaggccaaggcagaaggatcacttgagaccaggagttcaagaccagcctgagaaacatagtgagcccttgtctctacaaaaagaaataaaaataatagctgggtgtggtggcatgcgcatgtagtcccagctactcagaaggatgaggtgggaggatctcttgaggctgggaggcagaggttgcagtgagctgagattgtgccactgcactccagcctgggtgacagcgagaccctgtctcaaaatatgtatatatttaatatatatataaaaccagagctgacaatgacactctggaacattgcataccttctgtacattctggggtacatggatttctactgagttggataatatgcatttgtaataaactatgaactatgaaaaaaaaaaaaaaaaaaa

SEQ ID NO: 2595 - protein, 341 aa, Homo sapiens
  ref <308>: DATABASE ACCESSION NUMBER: Refseq / NP_057455
  ref <309>: DATABASE ENTRY DATE: 2002-11-05
MRKVVLITGASSGIGLALCKRLLAEDDELHLCLACRNMSKAEAVCAALLASHPTAEVTIVQVDVSNLQSVFRASKELKQRFQRLDCIYLNAGIMPNPQLNIKALFFGLFSRKVIHMFSTAEGLLTQGDKITADGLQEVFETNVFGHFILIRELEPLLCHSDNPSQLIWTSSRSARKSNFSLEDFQHSKGKEPYSSSKYATDLLSVALNRNFNQQGLYSNVACPGTALTNLTYGILPPFIWTLLMPAILLLRFFANAFTLTPYNGTEALVWLFHQKPESLNPLIKYLSATTGFGRNYIMTQKMDLDEDTAEKFYQKLLELEKHIRVTIQKTDNQARLSGSCL

SEQ ID NO: 2596 - DNA, 499 bp, Rattus norvegicus
  ref <308>: DATABASE ACCESSION NUMBER: EMBL / AI639277
  ref <309>: DATABASE ENTRY DATE: 2000-03-04
ggcacgagatacagttccatgcgtgtaagcaagagttcttcgtgcaggtggttctcgtaagaatgggaacattgcagaccttttgaagacagtgtgtgcactggttagtacacagcagcactgcactgcgtcagcgacaggcatctagtaagaatctgaggttccaaagttaaaccctagttgctcctgtgtctcacatttgggggttactgggtagtttgggaaagcagaattttcatattaattttttacttaattttccttgtctttgacatggggagcatcagctatttccatattatgtttgaaagaaaacatttaacaaaacctttgggatatttatttggctttaacaccaattatgaaaattcatgtgttttctgaggtgtgggaggtaattgtgttaagtgactcactatagcatgcagcttgacaacacaaatgaaagtggttgctggaatagtagacttaacattgacaataaaaatatgacatttaa

SEQ ID NO: 2597 - DNA, 283 bp, Rattus norvegicus
  misc_feature (1)..(283): n=a, c, g or t
  ref <308>: DATABASE ACCESSION NUMBER: EMBL / H33528
  ref <309>: DATABASE ENTRY DATE: 2000-03-04
tcttgtgccatgtgtcttctctgtggacagttaantgtttaatggatatgtgctgattgtgtgattcactcctctttgtgggaactaaaatattctttttagctttatattttataaactgccagattgtacaattttatgtgtattttcaaagctcatgatatgagggtcactaagttaaacggcctatttttttacctcttgtacagttttataattctgctcactgatgaaggcnacttatgctgagccagccacaaataaaggtagttttagatttggg

SEQ ID NO: 2598 - DNA, 282 bp, Homo sapiens
  ref <308>: DATABASE ACCESSION NUMBER: EMBL / AI081269
  ref <309>: DATABASE ENTRY DATE: 2000-03-03
ttttttttttttctaaaactacctttattgtggttggctcgacataagatgccgccatcagcagaattataaaactgtacaggaggcacaaaaataggctgtttaacttagataatgaccctcatgtcttcaagctttaaaaatgcacataaaagttgtacaatctggcagtttataaaatataaagctaaaaagaggattttgggttccacaaagaagactgtatcacacaattaacacgtactaattaaacaattaaccatccacacagaagacataatg

SEQ ID NO: 2599 - DNA, 3748 bp, Rattus norvegicus
  ref <308>: DATABASE ACCESSION NUMBER: EMBL / U63839
  ref <309>: DATABASE ENTRY DATE: 2000-03-04
gggcgacagcaatgtggcacatccctcctcggaagtgaagggacagaagcgtcctaggcctctccacccttgctgacggcttcgcgccaagggctgccatggccacggggttctcctttgggtccgggaccctcggctccaccactgtggcccccggcggcaccggcacaggcagcggattctccttcggcgcgtccagcacaccttctgtggggctcaacttcggaactctcggaagctctgcgacaccagcatctacatctacttctgccagtggttttggaacaggactctttggatctaagcctggcactggattcactctaggaggaacaagtgcaggaacaacagctactacatctgcatctacaacaggctttagtttaggattcagtaaacctgcagcatctgccacaccatttgccctgcccgtcacttctaccacagctagtggtcttactctctcgtctgctctgacatcagctccagcagcatccacaggatttacgttgaataacttgggagcaacaccagccacaactacagcagcatcaacaggactttccttagggggggccttagctggtttgggaggttcacttttccagagtggaaacacagcaacatcaggtctcggacagaatgctttaagcttgtctctggggactgcaacacctacttcagcagccagcagtgaaggccttggtggtatagattttagtacctcatcagataaaaagagtgataaaacgggaacaaggccagaggatagcaaagccctgaaagatgaaaaccttcctcctgtcatctgtcaggatgttgagaatctccagaaatttgtcaaggaacaaaaacaagtccaagaagaaattagtcgaatgtcttccaaagcaatgcttaaagtccaggaggacatcaaggccctgaagcagctcctgtcattggctgctagtgggttgcagaggaacacactcaatattgacaaactgaagttagaaactgctcaggagttaaagaatgcggaaatagctttaagaacccagaaaacaccacctggactccaacatgaaaatacagctcctgctgactacttcagagtcttggttcagcaatttgaggtacagcttcagcagtacaggcagcagattgaagaactagaaaaccatcttgccactcaagcaaacaattcacatataactccgcaagacttatcaatggctatgcagaaaatttatcaaacatttgtagctttagctgcacaacttcagtccattcatgaaaatgtcaaggtgcttaaagaacagtatctcagctacagaaaaatgtttttgggtgatgctggggatgtgtttgaagccaggagaacagaagccaagaagtggcagaatgcacccagagttactactggacccacgcctttcagcaccatgccaaacgcagcagccgttgccatggctgcaacacttacacagcagcaacagcctgctacagggccacagccgtctctgggagttagttttggaacgccattcggctcaggtattggcactggcttgcaatcaagtggcttaggttcttcaaaccttggaggatttggaactagctctggtttcggatgcggtaccacaggggcctccacatttggatttggaacaacagataaaccctcaggaagtcttagtgcaggctttggcagctcaagtacgtctgggtttaacttcagcaatcctggcatcacggcatcagctggtttgacatttggggtgtccaatcctgcgtctgcggggtttggaacaggaggacaactccttcagttgaagagacctcccgctggaaacaaaagaggaaagagatgaacctatgggtcgaggtgttggccgtgcttagctggcgccgctcattctatgattctatttttctaatgatgtagtgattgagctgcatctcgggagatttataatgttttgatattcctcactctggaacttgaactttgtttgtttaccttaccagacatccttcttgtgaactcaaaatccagttgcagttctgttgctattacttttgactccatgtaagaaatgttgtgattaaattaccaagtgatagtggtgggaaaaacaattcatcaacctaaacctatgatttttcctagtattaatagcaatttttttgttgctggggtttaagctgtgaatacatgcacattggtttcttatgcagatggtttgaactctcaggcctgtgctagaagtagtttgttccttgacaaggcctttggaactgtgctgcagggcatcttgtagatatgtatgtaattatatatagagaaatgcacacagtgtgtgcacataaaatatatttacacacctacaactcttgcctcagactgttatccttttctagtgtatttagttattcactctttatgctttaggtcctcagcgcttataaaaggagtaacttagggtacctggtcacttcgtttgttaattagacagaagtgattcttgataaagtatttaacccattcaaattcattgactccactcctgtttttatttattccttgacccttatctacgaggaatggtctaaggcgcatcaaacagattttagaaacctttattaccctatgtatatattctcgtgctacaactatggaatcttttgtaaggagattgtcttttaggagtgtacgtgaactccagactgatgctctggggcaaagagctactaagccaaattgaatctatgcaggtgaaggatgcaatgttaattcagtaagaacttgtttagctgtttcaatacagaattcttcttatagggctatggagaaaccaaatgaagtggcttctaagcctcttaatgtgctgagtcttaatctggactagagaaactacattttaggaaaactctttgtaccaactatgaacttgctggtttgaagagtgagtggagctccagtgagtgccacggagttgtgtcaggttgtgtctgtgacctctgtctgtgctgccattcttggtgtttcgtgagtgaacatccactgtgaagggaattgccttaggaccatgtcagcgagaaagtagtcttcaggtgggatgaacacatggaattgcacggaaatagtttaattttttacatagaaagttttgtatataatgttcatcagtgaatattttcaggatcattttcaccaaggcaccttttctttctaaaataggtgtggtatacatacatacatatacacatatatatttttagtataatgtcacttgtgtttgactataaaagcattgtggttctgttttatttatctgcatataacagtgattggcattcctgaattcaatatttgcatcttgatgcattaaaataaggagagttatttgtctttgagcactaaacctgtttttatttgtatattttgtaattctgcagccctcggtccagattatgggggaggataggaaagggtgtgctttggcatttgaagttactatcagagttacatatgccattacaaaacactgctttgttagtttcttaaatacggtgtattatgctgcaaatagctgagtatttatatttctctgggttacttttttctttatatacattttcatatgttgaaccactggagacttgtaacattcatttgtggtaggagtcagagtgttgtctttgtctcctttgtctttgccttgtctattatggaaataataaaattgtgttagttgctttg

SEQ ID NO: 2600 - DNA, 6356 bp, Homo sapiens
  ref <308>: DATABASE ACCESSION NUMBER: Refseq / NM_014778
  ref <309>: DATABASE ENTRY DATE: 2003-03-08
gccttcgccgccgttggggctggaagttcccgccaggtccgtgccgggcgagagagatgctgcccggcccgcctcggctttgaggcgagagaagtgtcccagacccatttcgccttgctgacggcgtcgagccctggccagacatgtccacagggttctccttcgggtccgggactctgggctccaccaccgtggccgccggcgggaccagcacaggcggcgttttctccttcggaacgggagcgtctagcaacccttctgtggggctcaattttggaaatcttggaagtacttcaactccagcaactacatctgctccttcaagtggttttggaaccgggctctttggatctaaacctgccactgggttcactctaggaggaacaaatacaggaatagcaacaactataactacaggattaactctgggaacgccagccactacatctgcagctacaacaggcttcagtttaggattcaataaacctgcagcatctgccacaccatttgctctacctattacctctacctcagctagcggtctgactctttcgtctgctctgacatcaactccagcagcatccacaggatttactctaaataatttgggtgggacaacagccacaactacaactgcatcaacaggcctctctttagggggagccttagctggtttgggaggttcacttttccagagtacaaacacaggaacatcaggacttggacagaatgctttagggttgactttgggaactacagcagctacttcaactgcaggcaatgaaggccttggtggtatagatttcagtagctcctcagataaaaagagtgataaaacgggaacaagaccagaggatagtaaagctctgaaggatgaaaatctacctcctgtcatctgccaggatgttgaaaatctccagaaatttgtgaaggagcagaaacaagttcaagaagaaattagtagaatgtcttcaaaagcaatgcttaaggtacaagaagatattaaagctctgaagcagctcctgtcgttggctgccaatggaatacagagaaacactctcaacattgacaaattgaaaatagaaactgctcaggagttgaagaatgctgaaatagctttaagaacccagaagacaccacctggacttcaacatgaatatgcagctcctgctgactacttcagaatcttggttcagcaatttgaggtacagcttcagcagtacaggcagcagattgaagaactagaaaaccatcttgccactcaagcaaataattcacatataacccctcaagatttgtcaatggctatgcagaaaatttatcaaacatttgtagctttagcggcacaacttcagtctattcatgaaaatgtaaaggttctgaaagaacagtaccttggctacaggaaaatgttcttgggagatgctgttgatgtgtttgaaacaaggcgagcagaagccaagaagtggcagaacacacccagagttactactggacccactcctttcagcaccatgccaaacgcagcagccgttgccatggctgcaacacttacacagcagcaacagcctgctacaggtctgaacgcattcaagttatagcttcttactgttccaatgcagaacatttatgtgcgtttttataagtcttccatttgtgtgagcactgaagaaatttctatgagtagctgttccaatacaatctaaaattgtgatggacacgattataaacatacctgataaaaaaggcagggtagtcttagcaataattatacatcaattagatattgaatattgtgaatctacttaatgttatttgctgtaatgctataaatgccctttagaacatggtgtttcactagtgaattacatttaagaataacattagattctgaaatcatgactgtaccatttattgttttaaagtcagagatcatccatccattctttgaatttttcatatatgatactgataggtggtgcattctcattttcctcatacatagtgattacaaagtacccacattcaggatgaagtatgcttttattgactgaaggtatgttgaagatcaataggcttgtttgtatgtatgttgactgtaaacagaatacaagccctctaaaccaaattttgaagatgatacatgctagaattgtacctttccaaggtgaacagaacagcaagagcaggaaaaagatgttttgagatgtggattgcacattaaggagcaactgggaagttgaacagatgaaaataattggtgacatggaaagcagattgttttatttcttggtttagttacacttctaattagagaaacattttttgtggtcattctacagtgttttatttggtcctgtgtctttcggaggttaatagttatcttaatcctgccatcccttttgtcaggtttgaagcttgacatggaaaaatagtcttaatcgatattgatttttttattttaatcattcataaatttcttagtaatgcttactattcaatagcatgtgtctttctgagagttccatatagtccagtagtacattataatacacacaaattaatacatatttagattgcattcaagctacctatactagggaagcattctctggttttcactattggcagtttaaaaaattgttcttcacatttggagatgacagaattgacttgccataagtaaagggttgatgatagatttatgccaaatcctccatatcccgtggctggacccatgtgaatagtggctcgcacgagcactgtctggtagctctctagctggctggagtgtaggattgcgttgttaagttatggagggaaaaagtcattatgggattgattcctttgaggattgatatttcttcttaaaaggattcaatcccataattatgaccatcagctctcatgattacctaaccagttaatcaaaccaaccatagtactagtttactttttagagccagtattaatcctaaagtagataagtgtagatttggttaagtgttctttaaacatagtgaatttccattctattaaatagaacttgagaaatgtcagttatataaaaagttatgttgtaagtgaatatattctatgataaatacctaaacttgaagcaaaatctcctgtcaagggtttgtgtgtgtgtgtgtgtttaactttcttatctatagattattattttgagaaattcataggttttcacttatacattttgagcttgtggacatatggagatgtgtgttcattctctaaatgagtgcctactatgtgctgggctcgaggaatacaaaggtagacaatatagattttgtctttgccctctgtggtggttgacaatgttagcttaatctggagtattcttgaggagccttttgctcataggctttaattttgtctgtgacttttgccaggctttggggaaattgactgccttcactcttccctgaaactttgaagtccacataagggctttctcatcagatggcagaaattataatttattaacctaaacaaccttacagtgttttcgctttgaattgtatgaattcttagaactgagaagctaaacaacagtgataacaattttacattatcttttctttctccttttgtttctctaaaggtctcccaggccttcccagtcaaaattttcgttatttttagtcatgtcaccatgatgtgagatttctgagctctgttagatacatttagaaatgtccctatttatcaaatggtgttttgtaccccataagttatcccttatgccctgtgacttctgtgaaatctttgtttttaagtgccagtaacaaattttagaccatctagatgagggtagagagagcttatgcattgtttttatacatcactgttgatctatacaagatttgagttatcagaagggttttgcttttatttgcatatgaaatttttattaacatgaatatgggcacagagcaaatagcttcttagactgctgccttctgaaggtggcttctgtatctttctcagaggaggaggaatagacttaaacgacttctttgtcctccttcaattttttttttaatgaaaaagtatactagggcttaggcatgtgtgatttacagttatttgttctgaaggctgcagagaattgaaaatccagcaggctatttgtgtatgaaatcatgagcatcgataacgtggataacgtagttccatgttggcagaacttgacacttgtctataagtgcttcccaagcctcctgaaaaactgaagacatttacattaggcttttcagtataattttaatttaggataggttttttagcaatgtatctgggattgagttttgctattgtgttttgacactttaagagttcttgatgtttacataataagactttcttatgtgacttagctgctgttttaaggagagccaagacgttttgttaggaattcctaatttttagcttagtgtaggtttggacatttaaggtgtagtgttaaataggaaacattaagtatttcatcttagtttcttgtggttttgtgattttgttgtatttaataaccaaaggaacattccccattaaatcagtaagagtaaaatttttcaaactggggaaaacgcattttaggttttttaaagaaaaattattttaaaatgtgacttagaaataaccatactaattacattaggcatttggggtgatcatggaaaattataaaatatttttagcactttagtcctttttctgttaatgcagttttacttttaagaaagtaaaatttattctggaaaatatgaattacagcgctaaacctggttttgttgtgtgtgaatatattatatggtaacttttgtaaaatgttactctacatgaagatttcactttggccagtcattggtatatatcactacaaacttaattttatttatggaaataagaacctctcattggatgactattcaaatttcaaagcagacttcttgaattgtttacgtaacttttgcctgaaggatttagactgctttctaatagtgaaactaatatatatggtggccagagtgtaatatatgctaatactttggcatgggagatatttatcatgagtttttactattaaaaaatgttatacatttgcctacgagttttataaatgatgttgccttcagaatttgtgtgaaggtacaaaactaaaaatatcatgtatctgatgtgcaatggaaagtcttgtcatcattagatatgagttcttgattatattctgaatattgatgattagaaaaatcttatgttctgtcgctcttaacaacagacccacacacaacaaaaagcatgctatttgagtaactcttacgacttacaaggctgagggctgtggtgtgcattattctttagggtcttccaccagcagtgcctcctattaacctgtgacaaacaagtctctcaatgttaaagaactggacatgtgttttttatgttttttgttaggaatcagaaagtataataatatgcttggtttctttttcctatagtaacattttacaaaagagctgctaggcaggtattttattctcaaagtgatctcaaactggatgtaaaattttaaattatttttttaatagtagtataagaattctggctgctattagttattgtttgttttctgggttagaagctattcgaaaagtccagtttctgtcccagtgtagcaaaatgtagttcctcggttgtttttctttaaatgctttataattttacactacctttttaatatacaaacctcattcttcattggataacttgaaggctttgatttctttaaaaatttaaattttagtgtgtatattactttgacagttccctcatctttgagatgcactgatcactgtgcttgaaaaagacaatactgaagattgtactatgaagtttattgaataattttcataaattatttatccaaatgagagatttttagatttttgtattctgcttagttttaaaaaaaaaaaatagtagtttaaaagagaggctagtaagtttgatgctattcttgccaaacaaactcagccaaaatctttaaagtaacaagagggaaaaggatgactaatcgttctgcttctgagtacattttccaaaacgttggaaagaaacttctgaattgaaatcttgaatgtattgaatctgtcaaggtacacagcggtgcctttgtaaatgttcattactttatttaatcaggtgataagtggtgtaatgtagcagagcttaagaatagaactcaattatcactttttgtgaacaagttggaattgtcatgttactgtgtaattgatttgctttacaatgaacaataaatttaataaaat

SEQ ID NO: 2601 - protein, 485 aa, Homo sapiens
  ref <308>: DATABASE ACCESSION NUMBER: Refseq / NP_055593
  ref <309>: DATABASE ENTRY DATE: 2003-03-08
MSTGFSFGSGTLGSTTVAAGGTSTGGVFSFGTGASSNPSVGLNFGNLGSTSTPATTSAPSSGFGTGLFGSKPATGFTLGGTNTGIATTITTGLTLGTPATTSAATTGFSLGFNKPAASATPFALPITSTSASGLTLSSALTSTPAASTGFTLNNLGGTTATTTTASTGLSLGGALAGLGGSLFQSTNTGTSGLGQNALGLTLGTTAATSTAGNEGLGGIDFSSSSDKKSDKTGTRPEDSKALKDENLPPVICQDVENLQKFVKEQKQVQEEISRMSSKAMLKVQEDIKALKQLLSLAANGIQRNTLNIDKLKIETAQELKNAEIALRTQKTPPGLQHEYAAPADYFRILVQQFEVQLQQYRQQIEELENHLATQANNSHITPQDLSMAMQKIYQTFVALAAQLQSIHENVKVLKEQYLGYRKMFLGDAVDVFETRRAEAKKWQNTPRVTTGPTPFSTMPNAAAVAMAATLTQQQQPATGLNAFKL

SEQ ID NO: 2602 - DNA, 2157 bp, Rattus norvegicus
  ref <308>: DATABASE ACCESSION NUMBER: Refseq / NM_031096
  ref <309>: DATABASE ENTRY DATE: 2003-01-13
cctggccattcggtgggatcccaagcaccctggccacggccgtgtgcctccctttgtcccacaagggcaggaacaggccataggccaagggcaccaggtcaagcctgctttggctgctggtgccttgagcttgacttcagcttatgggtcttaacacttgaagtggacacagggcatcagcaggatggatttcgggtccttggaaaccgtggtggccaactctgccttcattgcggcccgaggcagctttgacggaagcagcaccccctcttcccgagacaagaagtatctggccaagctccggttgcccccactgtccaagtgtgagggtctccgtgacagcatcagcctagagtttgacaacctgtgctcggagcagcccattggcaagaggctcttccagcagttcctgaagacagacgagaggcatgtgccggctctggagctctggaaggacatcgaggactatgacactgccgatgacgacctacggccacagaaggctcaggccatcctggctgagtacctggacccacagggcacactcttctgcaacttcctggaccagggcatggtggcaagagtgaaggaagggccaactgggagccaggatgggctcttccagcctctgctgcaggccacactggagcacttgagtcagggccccttccaggagtacctgggaagcctatatttcctgcggtttcttcagtggaagtggttggaagcccagcccataggtgaagactggtttttggacttcagggtcctggggaaggggggctttggggaagtgtccgcctgccaaatgaaggcgaccggcaagatgtacgcttgcaagaagctgaacaagaagcggctgaagaagaggaaggggtaccagggcgccatcgttgagaagaggattctagctaaagtacacagcaggttcatcgtgtctctggcctatgcattcgaaaccaagaccgacctctgtctggtgatgaccatcatgaatggaggtgacgtaaggtaccacatctacaatgtggatgaggagaaccccggctttccggagccacgagccatctactacacagcacagatcatcagtggcctggagcacctgcatcagagacgcattgtctaccgtgacctcaagccagagaacgtgctgctggacaacgatggcaacatccgaatttctgaccttggactggccgtcgagttgaaggaagggcagaataagaccaagggctatgcagggaccccaggtttcatggcccccgagctcctgcgaggcgaagagtacgacttctctgtggactactttgccctgggggtcacattgtacgagatgatcgcagccagaggacccttccgagcccgaggagagaaggtggagaacaaggagcttaaacagcgcatcatctcagagcccgtgaagtacccagagaagttcagccaggccagcaaggacttctgtgagcagctgttagagaaggacccggagaagcgcctgggtttccgggatggaacctgtgacgccctaagggcgaatgtcctcttcaaagatatcagctggagacagctcgaagccggaatgctcatccctccgttcatcccagactctaggactgtctatgccaagaacattcaggatgtgggtgccttttccacagtcaagggtgtggtttttgacaaagcagacacagaattcttccaagaattcgcctccggcaactgctccattccctggcaggaggagatgattgagactgggttcttcggggacctcaacgtgtggcgcccagacggtcaaatgcccgatgacatgaagggaatcaccgtggaggaggcagcccctacagccaaatcagggatgtgtctcatctcctagcctagtgtttgggggaagcctggggctggctgtatagagagagggaaggatacagagctcaggggaggagagtgaccctggtgtcagcctgtgcccactccatccaggtcaccatgcaactgtgtcttcacaaggagccagcaagaatcccggtttagaccctagaagcatggcagtccattttttttgtcctgattcattcaaaaaagacaaaaaaaggccacagattgaacaataaaaaaaaaaaaaaaaaaaaaaaaaaaaaaaaaaaaaaaaaa

SEQ ID NO: 2603 - protein, 564 aa, Rattus norvegicus
  ref <308>: DATABASE ACCESSION NUMBER: Refseq / NP_112358
  ref <309>: DATABASE ENTRY DATE: 2003-01-13
MDFGSLETVVANSAFIAARGSFDGSSTPSSRDKKYLAKLRLPPLSKCEGLRDSISLEFDNLCSEQPIGKRLFQQFLKTDERHVPALELWKDIEDYDTADDDLRPQKAQAILAEYLDPQGTLFCNFLDQGMVARVKEGPTGSQDGLFQPLLQATLEHLSQGPFQEYLGSLYFLRFLQWKWLEAQPIGEDWFLDFRVLGKGGFGEVSACQMKATGKMYACKKLNKKRLKKRKGYQGAIVEKRILAKVHSRFIVSLAYAFETKTDLCLVMTIMNGGDVRYHIYNVDEENPGFPEPRAIYYTAQIISGLEHLHQRRIVYRDLKPENVLLDNDGNIRISDLGLAVELKEGQNKTKGYAGTPGFMAPELLRGEEYDFSVDYFALGVTLYEMIAARGPFRARGEKVENKELKQRIISEPVKYPEKFSQASKDFCEQLLEKDPEKRLGFRDGTCDALRANVLFKDISWRQLEAGMLIPPFIPDSRTVYAKNIQDVGAFSTVKGVVFDKADTEFFQEFASGNCSIPWQEEMIETGFFGDLNVWRPDGQMPDDMKGITVEEAAPTAKSGMCLIS

SEQ ID NO: 2604 - DNA, 1952 bp, Homo sapiens
  ref <308>: DATABASE ACCESSION NUMBER: Refseq / NM_002929
  ref <309>: DATABASE ENTRY DATE: 2000-10-31
acaggccacaggccaagggcagcagtcaggcctgctctgtctgtgaacgctcccggcttggcctcggctgatgggccctcacgcctgaagcgggcaggaagctccgggatggatttcgggtctttggagaccgtggtggccaactctgccttcatcgccgcccgaggcagctttgacggcagcagctcccaaccctcccgggacaagaagtacctggccaagctcaagctgcccccgctgtccaagtgtgagtccctccgcgacagcctcagcctggagtttgagagtgtgtgcttggagcagcccatcggcaagaagctctttcagcagttcctacaatcggcagagaagcacctgccggccctggagctctggaaagacatcgaggactatgacacggcagacaatgacctccagccacagaaggcccagaccatcctggcccagtacctggacccccaggccaaactcttctgcagcttcctggatgaggggatagtggcgaagtttaaggaggggcctgtggagatccaggacgggctcttccagcccctgctgcaggccaccctggcacacctgggccaagcccccttccaggagtacctgggcagcctgtacttcctgaggttcctgcagtggaagtggctggaagcccagcccatgggggaggactggttcctggacttcagggtcctggggaaagggggcttcggggaggtgtcggcctgccagatgaaggcgaccggcaagctgtatgcctgcaagaagctgaacaagaagcggctgaagaagaggaagggctaccagggtgctatggtggagaagaagattctgatgaaagtacacagcaggttcatcgtgtctctggcctatgcgtttgaaaccaaagccgacctctgtctggtgatgaccatcatgaacggaggtgacatcaggtaccacatctacaacgtgaatgaggagaaccctggcttcccggagccgcgcgccctcttctacacggcgcagatcatctgcggcctggagcacctgcaccagaggcggatcgtctaccgcgacctcaagcccgagaacgtgctgctggacaatgacggcaatgtccggatctctgaccttgggctggccgtggagctgctggacggacagagcaagaccaagggctacgcagggaccccaggtttcatggcccccgagctcctgcagggcgaggagtacgacttctccgtggactactttgccctgggggtcaccctgtatgagatgattgcggccagaggacccttccgagcccgtggagagaaggtggagaacaaggagctgaagcaccggatcatctcagagcccgtgaagtaccctgataagttcagccaggccagcaaggacttctgcgaggcgctgctggagaaggacccggagaagcgcctggggttcagagatgagacctgcgacaagctccgtgcccaccccctcttcaaggaccttaactggaggcagctggaggctgggatgctgatgccccctttcatcccagactccaaaactgtctacgcaaaggatattcaggacgtgggtgccttttccaccgtcaaaggtgtggcctttgacaaaacagacacagaattctttcaggaatttgccactggcaactgccccatcccctggcaggaggagatgatcgagacgggcatctttggcgagctgaacgtgtggcgctcggacggtcagatgccggacgacatgaagggcatctccgggggctccagctcctcgtccaagtcagggatgtgtctggtttcctaggtgacgccccagagtccacgtggaggaaaaggacccatacggctcgatgggggccgcctgcctccgtggtgccagcctggggtctgctagcaaggggacacgtggttccctccacccaggtccccatcacgccatctccttgcggcccaagg

SEQ ID NO: 2605 - protein, 563 aa, Homo sapiens
  ref <308>: DATABASE ACCESSION NUMBER: Refseq / NP_002920
  ref <309>: DATABASE ENTRY DATE: 2000-10-31
MDFGSLETVVANSAFIAARGSFDGSSSQPSRDKKYLAKLKLPPLSKCESLRDSLSLEFESVCLEQPIGKKLFQQFLQSAEKHLPALELWKDIEDYDTADNDLQPQKAQTILAQYLDPQAKLFCSFLDEGIVAKFKEGPVEIQDGLFQPLLQATLAHLGQAPFQEYLGSLYFLRFLQWKWLEAQPMGEDWFLDFRVLGKGGFGEVSACQMKATGKLYACKKLNKKRLKKRKGYQGAMVEKKILMKVHSRFIVSLAYAFETKADLCLVMTIMNGGDIRYHIYNVNEENPGFPEPRALFYTAQIICGLEHLHQRRIVYRDLKPENVLLDNDGNVRISDLGLAVELLDGQSKTKGYAGTPGFMAPELLQGEEYDFSVDYFALGVTLYEMIAARGPFRARGEKVENKELKHRIISEPVKYPDKFSQASKDFCEALLEKDPEKRLGFRDETCDKLRAHPLFKDLNWRQLEAGMLMPPFIPDSKTVYAKDIQDVGAFSTVKGVAFDKTDTEFFQEFATGNCPIPWQEEMIETGIFGELNVWRSDGQMPDDMKGISGGSSSSSKSGMCLVS
